(19) United States
(12) Patent Application Publication
(10) Pub. No.: US 2022/0054653 A1
(43) Pub. Date: Feb. 24, 2022

(54) MODIFIED MRNA FOR THE TREATMENT OF PROGRESSIVE FAMILIAL INTRAHEPATIC CHOLESTASIS DISORDERS

(71) Applicant: ModernaTX, Inc., Cambridge, MA (US)

(72) Inventors: Paolo Martini, Boston, MA (US); Vladimir Presnyak, Manchester, NH (US); Jingsong CAO, Cambridge, MA (US)

(73) Assignee: ModernaTX, Inc., Cambridge, MA (US)

(21) Appl. No.: 17/276,112

(22) PCT Filed: Sep. 13, 2019
(86) PCT No.: PCT/US2019/051172

§ 371 Date: Mar. 12, 2021

Related U.S. Application Data
(60) Provisional application No. 62/840,369, filed on Apr. 29, 2019.
(60) Provisional application No. 62/731,055, filed on Sep. 13, 2018.

(51) Int. Cl. A61K 48/00; A61K 9/51; C07K 14/705; A61P 1/16

(52) U.S. Cl. CPC A61K 48/005; A61P 1/16; C07K 14/705; A61K 9/5123

(57) ABSTRACT

The present disclosure provides compositions of nucleic acids relating to biliary epithelial transporters. For example, the present disclosure relates to nucleic acids capable of regulating the biliary secretion of phospholipids, including phosphatidylcholine, e.g., those encoded by ATP binding cassette subfamily B member 4 (ABCB4) or a biologically active fragment thereof, in a target cell. In a preferred embodiment, the present disclosure provides compositions comprising modified mRNA encoding ABCB4 formulated in a lipid nanoparticle (LNP) carrier and derivative constructs, which are useful for treating or preventing progressive familial intrahepatic cholestasis type 3 (PFIC3).

### RELATED APPLICATIONS

[0001] This application claims the benefit under 35 U.S.C. § 119(e) of U.S. provisional application 62/731,055, filed Sep. 13, 2018, and U.S. provisional application 62/840,369, filed Apr. 29, 2019, the entire contents of each of which are incorporated herein by reference.

### BACKGROUND

[0002] Progressive familial intrahepatic cholestasis (PFIC) refers to a group of familial cholestatic conditions caused by defects in biliary epithelial transporters. The clinical presentation usually occurs first in childhood with progressive cholestasis. This usually leads to failure to thrive, cirrhosis, and the need for liver transplantation. Initial treatment is supportive, with the use of agents to treat cholestasis and pruritus, including the use of ursodeoxycholic acid, cholestyramine, rifampin and naloxone. Partial external biliary diversion (PEBD) is a surgical approach that diverts bile from the gallbladder externally into an ileostomy bag, which can also be used to alleviate symptoms of PFICs. Ultimately, PFICs often lead to liver transplant when liver dysfunction becomes severe. The disease is typically progressive, leading to fulminant liver failure and death in childhood, in the absence of liver transplantation.

[0003] There are three types of PFIC, each caused by mutations in different genes. PFIC type 1 (PFIC-1) is caused by mutations in the gene encoding ATPase, aminophospholipid transporter, class I, type 8B, member 1 (ATP8B1), which is also known as ATPase phospholipid transporter 8B1, BRIC1, FIC1, PFIC, and PFIC1. ATP8B1 is a P-type ATPase protein that is responsible for phospholipid translocation across membranes. PFIC type 2 (PFIC-2) is caused by a variety of mutations in ABCB11, which encodes the bile salt export pump (BSEP) protein. PFIC type 3 (PFIC-3) is caused by a variety of mutations in ATP binding cassette subfamily B member 4 (ABCB4), which encodes a floppase. There is currently no effective treatment for the underlying genetic defect that leads to PFICs.

### SUMMARY

[0004] Provided herein is a composition comprising a modified polynucleotide having an open reading frame (ORF) encoding ATP binding cassette subfamily B member 4 (ABCB4) formulated in a lipid nanoparticle (LNP) carrier. In one embodiment, the ABCB4 polynucleotide comprises at least one chemically modified nucleobase, sugar, backbone, or any combination thereof. In another embodiment, the modified polynucleotide comprises at least one modified nucleoside. In one embodiment, the at least one modified nucleoside is selected from the group consisting of: pseudouridine, 1-methyl-pseudouridine, 5-methylcytidine, 5-methyluridine, 2′-O-methyluridine, 2-thiouridine, 5-methoxyuridine and N6-methyladenosine. In one embodiment, the at least one modified nucleoside is a 5-methoxyuridine. In one embodiment, at least 30% of the uridine residues are 5-methoxyuridines. In one embodiment, the modified polynucleotide comprises a poly-A region, a Kozak sequence, a 3′ untranslated region, a 5′ untranslated region, an miRNA binding site, or any combination thereof In one embodiment, the miRNA binding site is a miR-142 binding site. In one embodiment, the uracil or thymine content of the ORF relative to the theoretical minimum uracil or thymine content of a nucleotide sequence encoding the ABCB4 polypeptide (%UTM or %TTM), is between about 100% and about 150%. In one embodiment, the ORF further comprises at least one low-frequency codon. In one embodiment, the ORF is at least 92% identical to ABCB4-CO13, ABCB4-CO22, or ABCB4-CO9, or at least 91% identical to ABCB4-CO1, ABCB4-CO2, ABCB4-CO3, ABCB4-CO4, ABCB4-CO5, ABCB4-CO6, ABCB4-CO10, ABCB4-CO11, ABCB4-CO12, ABCB4-CO15, ABCB4-CO16, ABCB4-CO17, ABCB4-CO20, ABCB4-CO21, ABCB4-CO23, ABCB4-CO24, ABCB4-CO25, or ABCB4-CO26, or at least 90% identical to ABCB4-CO7, ABCB4-CO8, ABCB4-CO14, ABCB4-CO18, or ABCB4-CO19. In one embodiment, the LNP comprises an ionizable amino lipid. In one embodiment, the ionizable amino lipid is compound 1.

[0005] In another aspect, disclosed herein is a polynucleotide comprising an ORF, wherein the ORF is at least 92% identical to ABCB4-CO13, ABCB4-CO22, or ABCB4-CO9, wherein the ORF is at least 91% identical to ABCB4-CO1, ABCB4-CO2, ABCB4-CO3, ABCB4-CO4, ABCB4-CO5, ABCB4-CO6, ABCB4-CO10, ABCB4-CO11, ABCB4-CO12, ABCB4-CO15, ABCB4-CO16, ABCB4-CO17, ABCB4-CO20, ABCB4-CO21, ABCB4-CO23, ABCB4-CO24, ABCB4-CO25, or ABCB4-CO26, or wherein the ORF is at least 90% identical to ABCB4-CO7, ABCB4-CO8, ABCB4-CO14, ABCB4-CO18, or ABCB4-CO19. In one embodiment, the ABCB4 polypeptide comprises an amino acid sequence at least about 95% identical to (a) the polypeptide sequence of wild type ABCB4, isoform 1, (b) the polypeptide sequence of wild type ABCB4, isoform 2, or (c) the polypeptide sequence of wild type ABCB4, isoform 3, wherein the ABCB4 polypeptide has phosphatidylcholine translocation activity. In one embodiment, the ABCB4 polypeptide is a variant, derivative, or mutant having phosphatidylcholine translocation activity. In one embodiment, the polynucleotide encodes an ABCB4 polypeptide fused to one or more heterologous polypeptides. In one embodiment, the one or more heterologous polypeptides increase a pharmacokinetic property of the ABCB4 polypeptide. In one embodiment, upon administration to a subject, the polynucleotide has: a longer plasma half-life, increased expression of an ABCB4 polypeptide encoded by the ORF, a lower frequency of arrested translation resulting in an expression fragment, greater structural stability, or any combination thereof, relative to a corresponding polynucleotide comprising ABCB4, isoform 1, ABCB4, isoform 2, or ABCB4, isoform 3.

[0006] In another aspect, the disclosure provides a method of producing a polynucleotide having an open reading frame (ORF) encoding ATP binding cassette subfamily B member 4 (ABCB4), comprising modifying an ORF encoding an ABCB4 polypeptide by performing at least one synonymous substitution. In one embodiment, at least 90% of uridine residues are replaced with 5-methoxyuridine.

[0007] In another aspect, the disclosure provides a method of treating or preventing progressive familial intrahepatic choleostasis type 3 (PFIC3) in a patient in need thereof comprising administering to the patient a therapeutically effective amount of a composition comprising a modified mRNA molecule encoding an ABCB4 polypeptide. In one embodiment, the modified mRNA molecules comprises at least one modified nucleoside. In one embodiment, the at least one modified nucleoside is selected from the group consisting of: pseudouridine, 1-methyl-pseudouridine, 5-methylcytidine, 5-methyluridine, 2′-O-methyluridine, 2-thiouridine, 5-methoxyuridine and N6-methyl adenosine. In one embodiment, at least one modified nucleoside is a 5-methoxyuridine. In one embodiment, the modified mRNA molecule is formulated in a cationic lipid nanoparticle.

[0008] In another aspect, the disclosure provides a method of treating PFIC2 or BRIC2 in a patient in need thereof, the method comprising administering to the patient a therapeutically effective amount of a composition comprising a modified mRNA encoding a BSEP polypeptide. In one embodiment, the modified mRNA encoding a BSEP polypeptide comprises an open reading frame encoding ABCB11.

[0009] In another aspect, the disclosure provides a method of treating PFIC1 in a patient in need thereof, the method comprising administering to the patient a therapeutically effective amount of a composition comprising a modified mRNA encoding ATP8B1.

### BRIEF DESCRIPTION OF THE DRAWINGS

[0010] FIG. 1 depicts two Western blots confirming the expression of ABCB4 proteins in HEK293 cells transfected with ABCB4 modified RNA (modRNA) constructs. The blots confirm ectopic expression of the human or mouse ABCB4 mRNA in transfected mammalian cells. Anti-ABCB4 (C-219) recognizes both hABCB4 and mABCB4, while anti-ABCB4 (P3II-26) is hABCB4-specific.

[0011] FIG. 2 is a graph showing the level of bile phosphatidylcholine in mdr2 knockout mice 24 hours after treatment with modRNAs.

[0012] FIG. 3 is a capillary electrophoresis (CE)-based simple Western image and a graph showing the relative ABCB4 expression resulting from HEK293 cells transfected with modRNAs. The modRNAs in lanes 5-18 were codon-optimized. Earlier iterations of modRNAs (no codon-optimization) are shown in lanes 2-4. Lane 1 is eGFP. Lanes 19 and 20 are mock transfected.

[0013] FIG. 4 is a graph showing the phosphatidylcholine transporting activity of different modRNAs. Bars 1-3 show modRNAs that were not codon-optimized. Bars 4-12 and modRNA5, modRNA6, modRNA7, modRNA8, modRNA9 show codon-optimized modRNAs. The arrows indicate modRNAs (modRNA5, modRNA6, modRNA7, modRNA8, and modRNA9) selected for further analysis.

[0014] FIG. 5 is two graphs showing the in vivo phosphatidylcholine transporting activity of different modRNAs in mdr2 knockout mice before codon optimization (left graph; bar 1) and after codon optimization (right graph; modRNA5-modRNA9).

[0015] FIG. 6 shows the hepatic expression of hABCB4 protein in mdr2 knockout mice injected with modRNA7 mRNA at 1 mg/kg.

[0016] FIG. 7 shows an immunofluorescent study. hABCB4 modRNA was found to result in expression of the ABCB4 protein at the canalicular domain of hepatocytes. The tight junctional associated protein zonula occuludens-1 (ZO-1) was used to visualize the border of the bile canalicular structures.

[0017] FIG. 8 is a graph showing the total bile acid levels in serum 24 hours after injection of eGFP or ABCB4 modRNA in Mdr2 knockout mice. The wild-type mice were untreated.

[0018] FIG. 9 includes two graphs relating to a kinetic analysis of bile phosphatidylcholine output in Mdr2 knockout mice after a single injection of hABCB4 modRNA formulated in a compound 3 lipid nanoparticle.

[0019] FIG. 10 is a graph showing a kinetic study of the total bile acids in serum.

[0020] FIG. 11 shows two graphs depicting the phosphatidylcholine output in bile using modRNA formulated in two different nanocarriers.

[0021] FIG. 12 is a series of graphs showing the efficacy of the second formulation of modRNA in compound 1 lipid nanoparticles.

[0022] FIG. 13 is a graph showing the bile phosphatidylcholine level as a percentage of wild-type in mice after the first injection and after the fifth injection.

[0023] FIG. 14 is a graph showing the total bile acids in serum. There was a significant reduction in the mice that received hABCB4 modRNA.

[0024] FIGS. 15A-15C show improvements associated with hABCB4 modRNA treatment. FIG. 15A shows subject body weight throughout the study. FIG. 15B shows liver enzyme measurements and FIG. 15C shows liver weight, portal pressure, and the phosphatidylcholine level in bile as a percentage of wild-type.

[0025] FIG. 16 shows fibrotic progression in the Mdr2−/− mice treated with hABCB4 mRNA. The figure depicts connective tissue staining and a graphical representation of the fibrotic progression in mdr2 mice treated with hABCB4 modRNA. Sirius Red was used for staining purposes. Collagen content was also examined.

[0026] FIG. 17 is a series of graphs showing real-time PCR of various markers in liver fibrosis and inflammation.

[0027] FIGS. 18A-18C show an evaluation of liver fibrosis using immunohistochemical staining. HE staining was also carried out to see the histological change of livers after different treatments (bottom panel of FIG. 18C).

[0028] FIG. 19 is a series of images illustrating that multiple injections of hABCB4 modRNA largely improve the expression of hABCB4 protein in the canalicular domain.

[0029] FIG. 20 is a schematic representation of the domain structure of isoform 1 of ABCB4.

[0030] FIG. 21 is a schematic representation of the domain structure of isoform 2 of ABCB4.

[0031] FIG. 22 is a schematic representation of the domain structure of isoform 3 of ABCB4.

[0032] FIG. 23 is a plot showing the half-life of human BSEP. Protein levels were measured using capillary electrophoresis with anti-ABCB11 for detection. Expression was measured in HepaRG cells modified by knocking out endogenous BSEP expression.

[0033] FIG. 24 shows a schematic of an in vitro assay for BSEP activity and representative results. Titrated TCA were measured in the presence of a control (GFP) and expressed BSEP (mABCB11) in the middle panel. The lower panel shows reduced bile acids at least four days post-transfection.

[0034] FIG. 25 shows immunostaining of cells transfected with GFP (control) or hABCB11 modRNA in HepaRG cells (FIG. 23).

[0035] FIG. 26 is a plot showing delivery of modRNA to the liver of wild-type mice.

[0036] FIG. 27 depicts immunostained images showing protein expression in mice on a regular diet and on a model-inducing cholic acid diet. Protein is associated with membrane and expression is increased in the cholic acid-fed mice.

### DETAILED DESCRIPTION

[0037] Provided herein are nucleic acid molecules, including modified nucleic acid molecules, and methods of using the same, for example, to treat progressive familial intrahepatic cholestasis disorders. The nucleic acid molecules, including RNAs such as mRNAs, contain, for example, one or more modifications that improve properties of the molecule. Such improvements include, but are not limited to, increased stability and/or clearance in tissues, improved receptor uptake and/or kinetics, improved cellular access by the compositions, improved engagement with translational machinery, improved mRNA half-life, increased translation efficiency, improved immune evasion, improved protein production capacity, improved secretion efficiency, improved accessibility to circulation, improved protein half-life and/or modulation of a cell's status, improved function and/or improved activity.

[0038] The present disclosure provides compositions of nucleic acids relating to biliary epithelial transporters. For example, the present disclosure relates to nucleic acids capable of regulating the biliary secretion of phospholipids, including phosphatidylcholine, e.g., those encoded by ABCB4 or a biologically active fragment thereof, in a target cell. In other embodiments, the present disclosure relates to nucleic acids capable of regulating protein expression of a bile salt export pump (BSEP), e.g., that encoded by ABCB11, or a biologically active fragment thereof in a target cell. In still further embodiments, the present disclosure provides nucleic acids related to the catalyzation of ATP hydrolysis coupled to the transport of aminophospholipids (e.g., phosphatidylserine and phosphatidylethanolamine), e.g., those encoded by ATP8B1 or a biologically active fragment thereof, in a target cell.

[0039] The compositions provided herein are useful for treating diseases or disorder associated with a deficiency of biliary epithelial transporters, such as progressive familial intrahepatic cholestasis (PFIC). PFIC refers to a group of familial cholestatic conditions caused by defects in biliary epithelial transporters. Srivastava, J. Clin. Exp. Hepatol. 4(1): 25-36 (2014); Morotti et al., Seminars in Liver Disease 31(1): 3-10 (2011); and Stapelbroek et al., J. Hepatol. 52: 258-271 (2010). PFIC has been classified into three types (types 1, 2 and 3) based on the genetic defect involved in the transporter. PFIC3 is caused by mutation of ABCB4.

[0040] Signs and symptoms of PFIC typically begin in infancy and are related to bile acid buildup and liver disease. Specifically, affected individuals experience severe itching, yellowing of the skin and whites of the eyes (jaundice), failure to gain weight and grow at the expected rate, high blood pressure in the vein that supplies blood to the liver (portal hypertension), and an enlarged liver and spleen (hepatosplenomegaly). However, most people with PFIC3 have signs and symptoms related to liver disease only. Also, the signs and symptoms of PFIC3 usually do not appear until later in infancy or early childhood. Liver failure can occur in childhood or adulthood in people with PFIC3.

[0041] The present disclosure also provides compositions of nucleic acids capable of regulating protein expression of a bile salt export pump (BSEP), e.g., that is encoded by ABCB11, or a biologically active fragment thereof in a target cell. The compositions provided herein are useful for treating diseases or disorder associated with a deficiency of BSEP activity, such as, for example, benign recurrent intrahepatic cholestasis 2 (BRIC2) and progressive familial intrahepatic cholestasis (PFIC), e.g., PFIC2. Nucleic acids include, for example, polynucleotides, which further include, for example, ribonucleic acids (RNAs), deoxyribonucleic acids (DNAs), threose nucleic acids (TNAs; Yu, H. et al., Nat. Chem., 4:183 7, 2012), glycol nucleic acids (GNAs, for reviews see Ueda, N. et al., J. Het. Chem., 8:827 9, 1971; Zhang, L. et al., J. Am. Chem. Soc., 127:4174 5, 2005), peptide nucleic acids (PNAs; Nielsen, P. et al., Science, 254:1497 500, 1991), locked nucleic acids (LNAs; Alexei, A. et al., Tetrahedron, 54:3607 30, 1998), and other polynucleotides known in the art.

[0042] In addition, the compositions provided herein are useful for treating health issues associated with mutations in ATP8B1, including, but not limited to, are progressive familial intrahepatic cholestasis type 1 (PFIC-1), benign recurrent intrahepatic cholestasis type 1 (BRIC1), and intrahepatic cholestasis of pregnancy type 1 (ICP1). See, e.g., Deng, B. C. et al., World J. Gastroenterol. 18:6504-6509 (2012); Klomp, L. W. J. et al., Hepatology 40:27-38 (2004); and Muellenbach, R. et al., Gut 54:829-834 (2005). Cholestasis results from abnormal biliary transport from the liver into the small intestine. Id. PFIC-1 is a disorder characterized by early onset of cholestasis that progresses to hepatic fibrosis, cirrhosis, and end-stage liver disease before adulthood. Id. BRIC1 is a disorder characterized by intermittent episodes of cholestasis without progression to liver failure. Id. There is initial elevation of serum bile acids, followed by cholestatic jaundice which generally spontaneously resolves after periods of weeks to months. ICP1 is a liver disorder of pregnancy that presents during the second or third trimester with intense pruritus, which becomes more severe with advancing gestation, and cholestasis. Id. ICP1 causes fetal distress, spontaneous premature delivery and intrauterine death. ICP1 patients have spontaneous and progressive disappearance of cholestasis after delivery. Id.

[0043] One challenge associated with delivering nucleic acid-based therapeutics (e.g., mRNA therapeutics) in vivo stems from the innate immune response which can occur when the body's immune system encounters foreign nucleic acids. Foreign mRNAs can activate the immune system via recognition through toll-like receptors (TLRs), in particular TLR7/8, which is activated by single-stranded RNA (ssRNA). In nonimmune cells, the recognition of foreign mRNA can occur through the retinoic acid-inducible gene I (RIG-I). Immune recognition of foreign mRNAs can result in unwanted cytokine effects including interleukin-1β (IL-1β) production, tumor necrosis factor-a (TNF-a) distribution, and a strong type I interferon (type I IFN) response. The instant invention features the incorporation of different modified nucleotides within therapeutic mRNAs to minimize the immune activation and optimize the translation efficiency of mRNA to protein. Particular aspects of the invention feature a combination of nucleotide modification to reduce the innate immune response and sequence optimization, in particular, within the open reading frame (ORF) of therapeutic mRNAs encoding ABCB4, ABCB11, and/or ATP8B1 to enhance protein expression.

[0044] The mRNA therapeutic technology of the instant invention also features delivery of mRNA encoding ABCB4, ABCB11, and/or ATP8B1 via a lipid nanoparticle (LNP) delivery system. Lipid nanoparticles (LNPs) are an ideal platform for the safe and effective delivery of mRNAs to target cells. LNPs have the unique ability to deliver nucleic acids by a mechanism involving cellular uptake, intracellular transport and endosomal release or endosomal escape. The instant invention features ionizable amino lipid-based LNPs which have improved properties when administered in vivo. Without being bound in theory, it is believed that the ionizable amino lipid-based LNPs of the invention have improved properties, for example, cellular uptake, intracellular transport and/or endosomal release or endosomal escape. LNPs administered by systemic route (e.g., intravenous (IV) administration), for example, in a first administration, can accelerate the clearance of subsequently injected LNPs, for example, in further administrations. This phenomenon is known as accelerated blood clearance (ABC) and is a key challenge in a therapeutic context. This is because repeat administration of mRNA therapeutics is in most instances essential to maintain necessary levels of protein in target tissues in subjects (e.g., subjects suffering from progressive familial intrahepatic cholestasis (PFIC)). Repeat dosing challenges can be addressed on multiple levels. mRNA engineering and/or efficient delivery by LNPs can result in increased levels and or enhanced duration of protein being expressed following a first dose of administration, which in turn, can lengthen the time between first dose and subsequent dosing. It is known that the accelerated blood clearance (ABC) phenomenon is, at least in part, transient in nature, with the immune responses underlying ABC resolving after sufficient time following systemic administration. As such, increasing the duration of protein expression and/or activity following systemic delivery of an mRNA therapeutic of the invention in one aspect, combats the ABC phenomenon. Moreover, LNPs can be engineered to avoid immune sensing and/or recognition and can thus further avoid ABC upon subsequent or repeat dosing. Exemplary aspect of the invention feature novel LNPs which have been engineered to have reduced ABC.

[0045] In addition, methods and processes of preparing and delivering such nucleic acid to a target cell are also provided. Furthermore, kits and devices for the design, preparation, manufacture and formulation of such nucleic acids are also included in the instant disclosure.

### ATP Binding Cassette Subfamily B Member 4 (ABCB4)

[0046] ATP binding cassette subfamily B member 4 (ABCB4), also known as multidrug resistance protein 3, multiple drug resistance 3, MDR3, MDR2/3, MDR/TAP, P-glycoprotein 3, or PGY3), is a gene encoding a floppase. ABCB4 has three isoforms: isoform A (isoform 2) contains 1,279 amino acid residues (GenBank Accession Nos. NP_000434.1 and NM_000443.3), isoform B (isoform 1) contains 1,286 amino acid residues (GenBank Accession Nos. NP_061337.1 and NM_018849.2), and isoform C (isoform 3) contains 1,232 amino acid residues (GenBank Accession Nos. NP 061338.1 and NM 018850.2). Isoform A lacks amino acid residues 1094-1100 of isoform B. Isoform C lacks amino acid residues 929-975 and 1094-1100 of isoform B. FIGS. 21-23 show schematic representations of each isoform.

[0047] ABCB4 is responsible for biliary secretion of phospholipids, predominantly phosphatidylcholine. Defective phosphatidylcholine translocation leads to a lack of phosphatidylcholine in bile fluid. Phosphatidylcholine normally chaperones bile acids, preventing damage to the biliary epithelium. As such, PFIC3/ABCB4 deficiency can result in injury to the biliary epithelium and bile canaliculi, cholestasis, high serum γ-glutamyltranspeptidase (GGT) levels, and cholesterol gallstone disease.

### ATP Binding Cassette Subfamily B Member 11 (ABCB11)

[0048] ATP binding cassette, subfamily B, member 11 (ABCB11) encodes a Bile Salt Export Pump (BSEP, aka sPgp (sister of P-glycoprotein)). The deduced protein has a predicted topology similar to that of other members of the multidrug resistant (MDR) family, with two putative transmembrane domains, each with six spans, and two nucleotide binding folds containing highly conserved ATP binding cassettes (ABC). Northern blot analysis indicates the ABCB11 gene produces a 5.5 kb mRNA transcript in liver. Ten different alleles of the ABCB11 gene have been identified in PFIC2 patients. Four alleles cause premature termination of the protein; the remaining alleles were missense changes. Five of the missense alleles were found in consanguineous families and the affected individuals were all homozygous for the mutation. An exemplary protein sequence for BSEP encoded by human ABCB11 is published as NCBI reference no. NP_003733.2.

### ATPase, Aminophospholipid Transporter, Class I, Type 8B, Member 1 (ATP8B1)

[0049] ATPase, aminophospholipid transporter, class I, type 8B, member 1 (ATP8B1; EC 3.6.3.1) is a member of the P-type cation transport ATPase family and belongs to the subfamily of aminophospholipid-transporting ATPases. ATP8B1 serves as the catalytic component of a P4-ATPase flippase complex. Paulusma, C. C. et al., Hepatology 47:268-278 (2008). The P4-ATPase flippase complex catalyzes the hydrolysis of ATP coupled to the transport of aminophospholipids, such as phosphatidylserine and phosphatidylethanolamine, from the outer to the inner leaflet of various membranes, thus ensuring the maintenance of asymmetric distribution of phospholipids. Id.

[0050] Phospholipid translocation is implicated in vesicle formation and in uptake of lipid signaling molecules. It is also required for the preservation of cochlear hair cells in the inner ear. See, e.g., Munoz-Martinez, F. et al., Biochem. Pharmacol. 80:793-800 (2010) and Verhultst, P.M. et al., Hepatology 51:2049-2060 (2010). Phospholipid translocation can further play a role in asymmetric distribution of phospholipids in the canicular membrane, transport of bile acids into the canaliculus, uptake of bile acids from intestinal contents into intestinal mucosa, protecting hepatocytes from bile salts by establishing integrity of the canalicular membrane in cooperation with ABCB4, microvillus formation in polarized epithelial cells, and as a cardiolipin transporter during inflammatory injury. Id.

[0051] The coding sequence (CDS) for wild-type ATP8B1 canonical mRNA sequence is described at the NCBI Reference Sequence database (RefSeq) under accession number NM_005603.4 (Homo sapiens ATPase phospholipid transporting 8B1 (ATP8B1), mRNA). The wild-type ATP8B1 canonical protein sequence is described at the RefSeq database under accession number NP_005594.1 (phospholipid-transporting ATPase IC [Homo sapiens]). The ATP8B1 protein is 1251 amino acids long. It is noted that the specific nucleic acid sequences encoding the reference protein sequence in the RefSeq sequences are the coding sequence (CDS) as indicated in the respective RefSeq database entry.

[0052] In certain aspects, the disclosure provides a polynucleotide (e.g., a RNA, e.g., a mRNA) comprising a nucleotide sequence (e.g., an open reading frame (ORF)) encoding an ABCB4, ABCB11, or ATP8B1 polypeptide. In some embodiments, the ABCB4 polypeptide of the invention is a wild type full length human ABCB4 isoform 1, 2, or 3 protein. In some embodiments, the ABCB11 polypeptide of the invention is a wild type full length human ABCB11 protein. In some embodiments, the ATP8B1 polypeptide of the invention is a wild type full length human ATP8B1 protein. In some embodiments, the ABCB4 polypeptide, ABCB11 polypeptide, or ATP8B1 polypeptide of the invention is a variant, a peptide or a polypeptide containing a substitution, and insertion and/or an addition, a deletion and/or a covalent modification with respect to a wild-type ABCB4 isoform 1, 2, or 3 sequence, wild-type ABCB11 sequence, or wild-type ATP8B1 sequence. In some embodiments, sequence tags or amino acids, can be added to the sequences encoded by the polynucleotides of the invention (e.g., at the N-terminal or C-terminal ends), e.g., for localization. In some embodiments, amino acid residues located at the carboxy, amino terminal, or internal regions of a polypeptide of the invention can optionally be deleted providing for fragments.

[0053] In some embodiments, the polynucleotide (e.g., a RNA, e.g., an mRNA) comprising a nucleotide sequence (e.g., an ORF) of the invention encodes a substitutional variant of a human ABCB4 isoform 1, 2, or 3 sequence, a human ABCB11 sequence, or a human ATP8B1 sequence, which can comprise one, two, three or more than three substitutions. In some embodiments, the substitutional variant can comprise one or more conservative amino acids substitutions. In other embodiments, the variant is an insertional variant. In other embodiments, the variant is a deletional variant.

[0054] ABCB4, ABCB11, and ATP8B1 protein fragments, functional protein domains, variants, and homologous proteins (orthologs) are also within the scope of the ABCB4, ABCB11, and ATP8B 1polypeptides of the disclosure. Non-limiting examples of polypeptides encoded by the polynucleotides of the invention are shown in SEQ ID NO:1 (ABCB4, isoform 2), SEQ ID NO: 3 (ABCB4, isoform 1), SEQ ID NO: 5 (ABCB4, isoform 3), SEQ ID NO: 7 (ABCB11), and SEQ ID NO: 9 (ATP8B1).

[0055] Certain compositions and methods presented in this disclosure refer to the protein or polynucleotide sequences of wild type human ABCB4 isoform 1, 2, or 3. Such disclosures are equally applicable to other isoforms of ABCB4.

### Polynucleotides and Open Reading Frames (ORFs)

[0056] The instant invention features mRNAs for use in treating or preventing progressive familial intrahepatic cholestasis (PFIC). The mRNAs featured for use in the invention are administered to subjects and encode human ABCB4, ABCB11, and/or ATP8B1 protein in vivo. Accordingly, the invention relates to polynucleotides, e.g., mRNA, comprising an open reading frame of linked nucleosides encoding human ABCB4 (SEQ ID NO: 1), ABCB11 (SEQ ID NO: 7), or ATP8B1 (SEQ ID NO: 9), isoforms thereof, functional fragments thereof, and fusion proteins comprising ABCB4, ABCB11, or ATP8B1. In some embodiments, the open reading frame is sequence-optimized. In particular embodiments, the invention provides sequence-optimized polynucleotides comprising nucleotides encoding the polypeptide sequence of human ABCB4, human ABCB11, or human ATP8B1, or sequence having high sequence identity with those sequence optimized polynucleotides.

[0057] In certain aspects, the invention provides polynucleotides (e.g., a RNA such as an mRNA) that comprise a nucleotide sequence (e.g., an ORF) encoding one or more ABCB4, ABCB11, and/or ATP8B1 polypeptides. In some embodiments, the encoded ABCB4, ABCB11, or ATP8B1 polypeptide of the invention can be selected from: a full length ABCB4, ABCB11, or ATP8B1 polypeptide (e.g., having the same or essentially the same length as wild-type ABCB4 isoform 1, 2, or 3, wild-type ABCB11, or ATP8B1); a functional fragment of ABCB4, ABCB11, or ATP8B1 described herein (e.g., a truncated (e.g., deletion of carboxy, amino terminal, or internal regions) sequence shorter than wild-type ABCB4, ABCB11, or ATP8B1; but still allowing for ABCB4, ABCB11, or ATP8B1 activity); a variant thereof (e.g., full length or truncated ABCB4, ABCB11, or ATP8B1 proteins in which one or more amino acids have been replaced, e.g., variants that retain all or most of the ABCB4, ABCB11, or ATP8B1 activity of the polypeptide with respect to a reference isoform (such as any natural or artificial variants known in the art)); or a fusion protein comprising (i) a full length ABCB4 (e.g., SEQ ID NO:1), ABCB11 (SEQ ID NO:7), or ATP8B1 (SEQ ID NO: 9), a functional fragment or a variant thereof, and (ii) a heterologous protein.

[0058] In certain embodiments, the encoded ABCB4 polypeptide is a mammalian ABCB4 polypeptide, such as a human ABCB4 polypeptide, a functional fragment or a variant thereof. In certain embodiments, the encoded ABCB11 polypeptide is a mammalian ABCB11 polypeptide, such as a human ABCB11 polypeptide, a functional fragment or a variant thereof. In certain embodiments, the encoded ATP8B1 polypeptide is a mammalian ATP8B1 polypeptide, such as a human ATP8B1 polypeptide, a functional fragment or a variant thereof.

[0059] In some embodiments, the polynucleotide (e.g., a RNA, e.g., an mRNA) of the invention increases ABCB4, ABCB11, or ATP8B1 protein expression levels and/or detectable bile transport levels in cells when introduced in those cells, e.g., by at least 10%, at least 15%, at least 20%, at least 25%, at least 30%, at least 35%, at least 40%, at least 45%, at least 50%, at least 55%, at least 60%, at least 65%, at least 70%, at least 75%, at least 80%, at least 85%, at least 90%, at least 95%, or at least 100%, compared to ABCB4, ABCB11, or ATP8B1 protein expression levels and/or detectable bile transport levels in the cells prior to the administration of the polynucleotide of the invention. ABCB4, ABCB11, and ATP8B1 protein expression levels and/or bile transport activity can be measured according to methods know in the art. In some embodiments, the polynucleotide is introduced to the cells in vitro. In some embodiments, the polynucleotide is introduced to the cells in vivo.

[0060] In some embodiments, the polynucleotides (e.g., a RNA, e.g., an mRNA) of the invention comprise a nucleotide sequence (e.g., an ORF) that encodes a wild-type human ABCB4, e.g., wild-type isoform 2 of human ABCB4 (SEQ ID NO: 1). In some embodiments, the polynucleotides (e.g., a RNA, e.g., an mRNA) of the invention comprise a nucleotide sequence (e.g., an ORF) that encodes a wild-type human ABCB11 (SEQ ID NO: 7). In some embodiments, the polynucleotides (e.g., a RNA, e.g., an mRNA) of the invention comprise a nucleotide sequence (e.g., an ORF) that encodes a wild-type human ATP8B1, e.g., wild-type human ATP8B1 (SEQ ID NO: 9).

[0061] In some embodiments, the polynucleotide (e.g., a RNA, e.g., an mRNA) of the invention comprises a codon optimized nucleic acid sequence, wherein the open reading frame (ORF) of the codon optimized nucleic acid sequence is derived from a wild-type ABCB4, ABCB11, or ATP8B1sequence (e.g., wild-type human ABCB4, a wild-type human ABCB11, or a wild-type human ATP8B1). For example, for polynucleotides of invention comprising a sequence optimized ORF encoding ABCB4, ABCB11, or ATP8B1, the corresponding wild type sequence is the native human ABCB4, ABCB11, or ATP8B1. Similarly, for a sequence optimized mRNA encoding a functional fragment of human ABCB4, ABCB11, or ATP8B1, the corresponding wild type sequence is the corresponding fragment from human ABCB4, ABCB11, or ATP8B1.

[0062] In some embodiments, the polynucleotides (e.g., a RNA, e.g., an mRNA) of the invention comprise a nucleotide sequence encoding ABCB4 isoform 2 having the full length sequence of human ABCB4 isoform 2 (i.e., including the initiator methionine). In some embodiments, the polynucleotides (e.g., a RNA, e.g., an mRNA) of the invention comprise a nucleotide sequence encoding ABCB4 isoform 1 having the full length sequence of human ABCB4 isoform 1 (i.e., including the initiator methionine). In some embodiments, the polynucleotides (e.g., a RNA, e.g., an mRNA) of the invention comprise a nucleotide sequence encoding ABCB4 isoform 3 having the full length sequence of human ABCB4 isoform 3 (i.e., including the initiator methionine). In some embodiments, the polynucleotides (e.g., a RNA, e.g., an mRNA) of the invention comprise a nucleotide sequence encoding ABCB11 isoform 1 having the full length sequence of human ABCB11. In some embodiments, the polynucleotides (e.g., a RNA, e.g., an mRNA) of the invention comprise a nucleotide sequence encoding ATP8B1 having the full length sequence of human ATP8B1 (i.e., including the initiator methionine). In some embodiments, the polynucleotide (e.g., a RNA, e.g., an mRNA) of the invention comprising a nucleotide sequence encoding ABCB4, ABCB11, or ATP8B1 having the full length or mature sequence of human ABCB4, ABCB11, or ATP8B1 is sequence optimized.

[0063] In some embodiments, the polynucleotides (e.g., a RNA, e.g., an mRNA) of the invention comprise a nucleotide sequence (e.g., an ORF) encoding a mutant ABCB4, ABCB11, or ATP8B1 polypeptide. In some embodiments, the polynucleotides of the invention comprise an ORF encoding an ABCB4, ABCB11, or ATP8B 1polypeptide that comprises at least one point mutation in the ABCB4, ABCB11, or ATP8B1 amino acid sequence and retains bile transport activity. In some embodiments, the mutant ABCB4, ABCB11, or ATP8B1 polypeptide causes a bile transport activity which is at least 10%, at least 15%, at least 20%, at least 25%, at least 30%, at least 35%, at least 40%, at least 45%, at least 50%, at least 55%, at least 60%, at least 65%, at least 70%, at least 75%, at least 80%, at least 85%, at least 90%, at least 95%, or at least 100% of the bile transport activity resulting from the corresponding wild-type ABCB4, ABCB11, or ATP8B1 (i.e., the same ABCB4, ABCB11, or ATP8B1 isoform but without the mutation(s)). In some embodiments, the polynucleotide (e.g., a RNA, e.g., an mRNA) of the invention comprising an ORF encoding a mutant ABCB4, ABCB11, or ATP8B1 polypeptide is sequence optimized.

[0064] In some embodiments, the polynucleotide (e.g., a RNA, e.g., an mRNA) of the invention comprises a nucleotide sequence (e.g., an ORF) that encodes an ABCB4, ABCB11, or ATP8B1 polypeptide with mutations that do not alter bile transport activity. Such mutant ABCB4, ABCB11, or ATP8B1 polypeptides can be referred to as function-neutral. In some embodiments, the polynucleotide comprises an ORF that encodes a mutant ABCB4, ABCB11, or ATP8B1 polypeptide comprising one or more function-neutral point mutations.

[0065] In some embodiments, the mutant ABCB4, ABCB11, or ATP8B1 polypeptide has higher bile transport activity than the corresponding wild-type ABCB4, ABCB11, or ATP8B1. In some embodiments, the mutant ABCB4, ABCB11, or ATP8B1 polypeptide causes bile transport activity that is at least 10%, at least 15%, at least 20%, at least 25%, at least 30%, at least 35%, at least 40%, at least 45%, at least 50%, at least 55%, at least 60%, at least 65%, at least 70%, at least 75%, at least 80%, at least 85%, at least 90%, at least 95%, or at least 100% higher than the activity of the corresponding wild-type ABCB4, ABCB11, or ATP8B1 (i.e., the same ABCB4, ABCB11, or ATP8B1 isoform but without the mutation(s)).

[0066] In some embodiments, the polynucleotides (e.g., a RNA, e.g., an mRNA) of the invention comprise a nucleotide sequence (e.g., an ORF) encoding a functional ABCB4, ABCB11, or ATP8B1 fragment, e.g., where one or more fragments correspond to a polypeptide subsequence of a wild type ABCB4, ABCB11, or ATP8B1 polypeptide and retain bile transport activity. In some embodiments, the ABCB4, ABCB11, or ATP8B1 fragment causes bile transport activity which is at least 10%, at least 15%, at least 20%, at least 25%, at least 30%, at least 35%, at least 40%, at least 45%, at least 50%, at least 55%, at least 60%, at least 65%, at least 70%, at least 75%, at least 80%, at least 85%, at least 90%, at least 95%, or at least 100% of the bile transport activity of the corresponding full length ABCB4, ABCB11, or ATP8B1. In some embodiments, the polynucleotides (e.g., a RNA, e.g., an mRNA) of the invention comprising an ORF encoding a functional ABCB4, ABCB11, or ATP8B1 fragment are sequence optimized.

[0067] In some embodiments, the polynucleotide (e.g., a RNA, e.g., an mRNA) of the invention comprises a nucleotide sequence (e.g., an ORF) encoding an ABCB4, ABCB11, or ATP8B1 fragment that causes higher bile transport activity than the corresponding full length ABCB4, ABCB11, or ATP8B1. Thus, in some embodiments the ABCB4, ABCB11, or ATP8B1 fragment causes a bile transport activity which is at least 10%, at least 15%, at least 20%, at least 25%, at least 30%, at least 35%, at least 40%, at least 45%, at least 50%, at least 55%, at least 60%, at least 65%, at least 70%, at least 75%, at least 80%, at least 85%, at least 90%, at least 95%, or at least 100% higher than the bile transport activity of the corresponding full length ABCB4, ABCB11, or ATP8B1.

[0068] In some embodiments, the polynucleotide (e.g., a RNA, e.g., an mRNA) of the invention comprises a nucleotide sequence (e.g., an ORF) encoding an ABCB4 fragment that is at least 1%, 2%, 3%, 4%, 5%, 6%, 7%, 8%, 9%, 10%, 11%, 12%, 13%, 14%, 15%, 16%, 17%, 18%, 19%, 20%, 21%, 22%, 23%, 24% or 25% shorter than wild-type ABCB4 isoform 1, 2, or 3. In some embodiments, the polynucleotide (e.g., a RNA, e.g., an mRNA) of the invention comprises a nucleotide sequence (e.g., an ORF) encoding an ABCB11 fragment that is at least 1%, 2%, 3%, 4%, 5%, 6%, 7%, 8%, 9%, 10%, 11%, 12%, 13%, 14%, 15%, 16%, 17%, 18%, 19%, 20%, 21%, 22%, 23%, 24% or 25% shorter than wild-type ABCB11. In some embodiments, the polynucleotide (e.g., a RNA, e.g., an mRNA) of the invention comprises a nucleotide sequence (e.g., an ORF) encoding an ATP8B1 fragment that is at least 1%, 2%, 3%, 4%, 5%, 6%, 7%, 8%, 9%, 10%, 11%, 12%, 13%, 14%, 15%, 16%, 17%, 18%, 19%, 20%, 21%, 22%, 23%, 24% or 25% shorter than wild-type ATP8B1.

[0069] In some embodiments, the polynucleotide (e.g., a RNA, e.g., an mRNA) of the invention comprises a nucleotide sequence (e.g., an ORF) encoding an ABCB4 polypeptide (e.g., the sequence depicted in SEQ ID NO:1, functional fragment, or variant thereof), wherein the nucleotide sequence has at least 70%, at least 71%, at least 72%, at least 73%, at least 74%, at least 75%, at least 76%, at least 77%, at least 78%, at least 79%, at least 80%, at least 81%, at least 82%, at least 83%, at least 84%, at least 85%, at least 86%, at least 87%, at least 88%, at least 89%, at least 90%, at least 91%, at least 92%, at least 93%, at least 94%, at least 95%, at least 96%, at least 97%, at least 98%, at least 99%, or 100% sequence identity to a sequence selected from the group consisting of SEQ ID NO: 2, 4, 6, 68-92, 118, 120, 122, and 124.

[0070] In some embodiments, the polynucleotide (e.g., a RNA, e.g., an mRNA) of the invention comprises a nucleotide sequence (e.g., an ORF) encoding an ABCB11 polypeptide (e.g., the sequence depicted in SEQ ID NO:7, functional fragment, or variant thereof), wherein the nucleotide sequence has at least 70%, at least 71%, at least 72%, at least 73%, at least 74%, at least 75%, at least 76%, at least 77%, at least 78%, at least 79%, at least 80%, at least 81%, at least 82%, at least 83%, at least 84%, at least 85%, at least 86%, at least 87%, at least 88%, at least 89%, at least 90%, at least 91%, at least 92%, at least 93%, at least 94%, at least 95%, at least 96%, at least 97%, at least 98%, at least 99%, or 100% sequence identity to a sequence selected from the group consisting of SEQ ID NO: 8, 126, 128, 130, 132, 134, 136, 138, 140, and 142.

[0071] In some embodiments, the polynucleotide (e.g., a RNA, e.g., an mRNA) of the invention comprises a nucleotide sequence (e.g., an ORF) encoding an ATP8B1 polypeptide (e.g., the sequence depicted in SEQ ID NO:9, functional fragment, or variant thereof), wherein the nucleotide sequence has at least 70%, at least 71%, at least 72%, at least 73%, at least 74%, at least 75%, at least 76%, at least 77%, at least 78%, at least 79%, at least 80%, at least 81%, at least 82%, at least 83%, at least 84%, at least 85%, at least 86%, at least 8′7%, at least 88%, at least 89%, at least 90%, at least 91%, at least 92%, at least 93%, at least 94%, at least 95%, at least 96%, at least 97%, at least 98%, at least 99%, or 100% sequence identity to a sequence selected from the group consisting of SEQ ID NO: 10, 93-117.

[0072] In some embodiments, the polynucleotide (e.g., a RNA, e.g., an mRNA) of the invention comprises an ORF encoding an ABCB4 polypeptide (e.g., the wild-type sequence, functional fragment, or variant thereof), wherein the polynucleotide comprises a nucleic acid sequence having 70% to 100%, 75% to 100%, 80% to 100%, 85% to 100%, 70% to 95%, 80% to 95%, 70% to 85%, 75% to 90%, 80% to 95%, 70% to 75%, 75% to 80%, 80% to 85%, 85% to 90%, 90% to 95%, or 95% to 100%, sequence identity to a sequence selected from the group consisting of SEQ ID NO: 2, 4, 6, 68-92, 118, 120, 122, and 124. In some embodiments, the polynucleotide (e.g., a RNA, e.g., an mRNA) of the invention comprises an ORF encoding an ABCB11 polypeptide (e.g., the wild-type sequence, functional fragment, or variant thereof), wherein the polynucleotide comprises a nucleic acid sequence having 70% to 100%, 75% to 100%, 80% to 100%, 85% to 100%, 70% to 95%, 80% to 95%, 70% to 85%, 75% to 90%, 80% to 95%, 70% to 75%, 75% to 80%, 80% to 85%, 85% to 90%, 90% to 95%, or 95% to 100%, sequence identity to a sequence selected from the group consisting of SEQ ID NO: 8, 126, 128, 130, 132, 134, 136, 138, 140, and 142. In some embodiments, the polynucleotide (e.g., a RNA, e.g., an mRNA) of the invention comprises an ORF encoding an ATP8B1 polypeptide (e.g., the wild-type sequence, functional fragment, or variant thereof), wherein the polynucleotide comprises a nucleic acid sequence having 70% to 100%, 75% to 100%, 80% to 100%, 85% to 100%, 70% to 95%, 80% to 95%, 70% to 85%, 75% to 90%, 80% to 95%, 70% to 75%, 75% to 80%, 80% to 85%, 85% to 90%, 90% to 95%, or 95% to 100%, sequence identity to a sequence selected from the group consisting of SEQ ID NO: 10, 93-117.

[0073] In some embodiments the polynucleotide (e.g., a RNA, e.g., an mRNA) of the invention comprises a nucleotide sequence (e.g., an ORF) encoding an ABCB4 polypeptide (e.g., the wild-type sequence, functional fragment, or variant thereof), wherein the nucleotide sequence is between 70% and 90% identical; between 75% and 85% identical; between 76% and 84% identical; between 77% and 83% identical, between 77% and 82% identical, or between 78% and 81% identical to a sequence selected from the group consisting of SEQ ID NO: 2, 4, 6, 68-92, 118, 120, 122, and 124. In some embodiments the polynucleotide (e.g., a RNA, e.g., an mRNA) of the invention comprises a nucleotide sequence (e.g., an ORF) encoding an ABCB11 polypeptide (e.g., the wild-type sequence, functional fragment, or variant thereof), wherein the nucleotide sequence is between 70% and 90% identical; between 75% and 85% identical; between 76% and 84% identical; between 77% and 83% identical, between 77% and 82% identical, or between 78% and 81% identical to a sequence selected from the group consisting of SEQ ID NO: 8, 126, 128, 130, 132, 134, 136, 138, 140, and 142. In some embodiments the polynucleotide (e.g., a RNA, e.g., an mRNA) of the invention comprises a nucleotide sequence (e.g., an ORF) encoding an ATP8B1 polypeptide (e.g., the wild-type sequence, functional fragment, or variant thereof), wherein the nucleotide sequence is between 70% and 90% identical; between 75% and 85% identical; between 76% and 84% identical; between 77% and 83% identical, between 77% and 82% identical, or between 78% and 81% identical to a sequence selected from the group consisting of SEQ ID NO: 10, 93-117.

[0074] In some embodiments, the polynucleotide (e.g., a RNA, e.g., an mRNA) of the invention comprises from about 900 to about 100,000 nucleotides (e.g., from 900 to 1,000, from 900 to 1,100, from 900 to 1,200, from 900 to 1,300, from 900 to 1,400, from 900 to 1,500, from 1,000 to 1,100, from 1,000 to 1,100, from 1,000 to 1,200, from 1,000 to 1,300, from 1,000 to 1,400, from 1,000 to 1,500, from 1,187 to 1,200, from 1,187 to 1,400, from 1,187 to 1,600, from 1,187 to 1,800, from 1,187 to 2,000, from 1,187 to 3,000, from 1,187 to 5,000, from 1,187 to 7,000, from 1,187 to 10,000, from 1,187 to 25,000, from 1,187 to 50,000, from 1,187 to 70,000, or from 1,187 to 100,000).

[0075] In some embodiments, the polynucleotide of the invention (e.g., a RNA, e.g., an mRNA) comprises a nucleotide sequence (e.g., an ORF) encoding an ABCB4, ABCB11, or ATP8B1 polypeptide (e.g., the wild-type sequence, functional fragment, or variant thereof), wherein the length of the nucleotide sequence (e.g., an ORF) is at least 500 nucleotides in length (e.g., at least or greater than about 500, 600, 700, 80, 900, 1,000, 1,050, 1,100, 1,187, 1,200, 1,300, 1,400, 1,500, 1,600, 1,700, 1,800, 1,900, 2,000, 2,100, 2,200, 2,300, 2,400, 2,500, 2,600, 2,700, 2,800, 2,900, 3,000, 3,100, 3,200, 3,300, 3,400, 3,500, 3,600, 3,700, 3,800, 3,900, 4,000, 4,100, 4,200, 4,300, 4,400, 4,500, 4,600, 4,700, 4,800, 4,900, 5,000, 5,100, 5,200, 5,300, 5,400, 5,500, 5,600, 5,700, 5,800, 5,900, 6,000, 7,000, 8,000, 9,000, 10,000, 20,000, 30,000, 40,000, 50,000, 60,000, 70,000, 80,000, 90,000 or up to and including 100,000 nucleotides).

[0076] In some embodiments, the polynucleotide of the invention (e.g., a RNA, e.g., an mRNA) comprises a nucleotide sequence (e.g., an ORF) encoding an ABCB4, ABCB11, or ATP8B1 polypeptide (e.g., the wild-type sequence, functional fragment, or variant thereof) further comprises at least one nucleic acid sequence that is noncoding, e.g., a microRNA binding site. In some embodiments, the polynucleotide (e.g., a RNA, e.g., an mRNA) of the invention further comprises a 5′-UTR (e.g., selected from the sequences of SEQ ID NO: 12, 172, 183, 184, 186-189, 191-194, 223-239, 287 and 288) and a 3′UTR (e.g., selected from the sequences of SEQ ID NO: 13, 154, 170-173, 176-185, 190-205, and 206-222). In some embodiments, the polynucleotide (e.g., a RNA, e.g., an mRNA) of the invention comprises a sequence selected from the group consisting of SEQ ID NO: 12 172, 183, 184, 186-189, 191-194, 223-239, 287 and 288. In a further embodiment, the polynucleotide (e.g., a RNA, e.g., an mRNA) comprises a 5′ terminal cap (e.g., CapO, Capl, ARCA, inosine, N1-methyl-guanosine, 2′-fluoro-guanosine, 7-deaza-guanosine, 8-oxo-guanosine, 2-amino-guanosine, LNA-guanosine, 2-azidoguanosine, Cap2, Cap4, 5′ methylG cap, or an analog thereof) and a poly-A-tail region (e.g., about 100 nucleotides in length). In a further embodiment, the polynucleotide (e.g., a RNA, e.g., an mRNA) comprises a 3′ UTR comprising a nucleic acid sequence selected from the group consisting of SEQ ID NO: 13, 206-222, or any combination thereof. In some embodiments, the mRNA comprises a 3′ UTR comprising a nucleic acid sequence of SEQ ID NO: 13. In some embodiments, the mRNA comprises a poly-A tail. In some instances, the poly-A tail is 50-150, 75-150, 85-150, 90-150, 90-120, 90-130, or 90-150 nucleotides in length. In some instances, the poly-A tail is 100 nucleotides in length.

[0077] In some embodiments, the polynucleotide of the invention (e.g., a RNA, e.g., an mRNA) comprises a nucleotide sequence (e.g., an ORF) encoding an ABCB4, ABCB11, or ATP8B1 polypeptide is single stranded or double stranded.

[0078] In some embodiments, the polynucleotide of the invention comprising a nucleotide sequence (e.g., an ORF) encoding an ABCB4, ABCB11, or ATP8B1 polypeptide (e.g., the wild-type sequence, functional fragment, or variant thereof) is DNA or RNA. In some embodiments, the polynucleotide of the invention is RNA. In some embodiments, the polynucleotide of the invention is, or functions as, an mRNA. In some embodiments, the mRNA comprises a nucleotide sequence (e.g., an ORF) that encodes at least one ABCB4, ABCB11, or ATP8B1 polypeptide, and is capable of being translated to produce the encoded ABCB4, ABCB11, or ATP8B1 polypeptide in vitro, in vivo, in situ or ex vivo.

[0079] In some embodiments, the polynucleotide of the invention (e.g., a RNA, e.g., an mRNA) comprises a sequence-optimized nucleotide sequence (e.g., an ORF) encoding an ABCB4, ABCB11, or ATP8B1 polypeptide (e.g., the wild-type sequence, functional fragment, or variant thereof, see e.g., SEQ ID NO: 1, 3, 5, 7, 9), wherein the polynucleotide comprises at least one chemically modified nucleobase, e.g., N1-methylpseudouracil or 5-methoxyuracil. In certain embodiments, all uracils in the polynucleotide are N1-methylpseudouracils. In other embodiments, all uracils in the polynucleotide are 5-methoxyuracils. In some embodiments, the polynucleotide further comprises a miRNA binding site, e.g., a miRNA binding site that binds to miR-142 and/or a miRNA binding site that binds to miR-126.

[0080] In some embodiments, the polynucleotide (e.g., a RNA, e.g., a mRNA) disclosed herein is formulated with a delivery agent comprising, e.g., a compound having the Formula (I), e.g., any of Compounds 1-232, e.g., Compound II; a compound having the Formula (III), (IV), (V), or (VI), e.g., any of Compounds 233-342, e.g., Compound VI; or a compound having the Formula (VIII), e.g., any of Compounds 419-428, e.g., Compound I, or any combination thereof In some embodiments, the delivery agent comprises Compound II, DSPC, Cholesterol, and Compound I or PEG-DMG, e.g., with a mole ratio of about 50:10:38.5:1.5. In some embodiments, the delivery agent comprises Compound VI, DSPC, Cholesterol, and Compound I or PEG-DMG, e.g., with a mole ratio in the range of about 30 to about 60 mol % Compound II or VI (or related suitable amino lipid) (e.g., 30-40, 40-45, 45-50, 50-55 or 55-60 mol % Compound II or VI (or related suitable amino lipid)), about 5 to about 20 mol % phospholipid (or related suitable phospholipid or “helper lipid”) (e.g., 5-10, 10-15, or 15-20 mol % phospholipid (or related suitable phospholipid or “helper lipid”)), about 20 to about 50 mol % cholesterol (or related sterol or “non-cationic” lipid) (e.g., about 20-30, 30-35, 35-40, 40-45, or 45-50 mol % cholesterol (or related sterol or “non-cationic” lipid)) and about 0.05 to about 10 mol % PEG lipid (or other suitable PEG lipid) (e.g., 0.05-1, 1-2, 2-3, 3-4, 4-5, 5-7, or 7-10 mol % PEG lipid (or other suitable PEG lipid)). An exemplary delivery agent can comprise mole ratios of, for example, 47.5:10.5:39.0:3.0 or 50:10:38.5:1.5. In certain instances, an exemplary delivery agent can comprise mole ratios of, for example, 47.5:10.5:39.0:3; 47.5:10:39.5:3; 47.5:11:39.5:2; 47.5:10.5:39.5:2.5; 47.5:11:39:2.5; 48.5:10:38.5:3; 48.5:10.5:39:2; 48.5:10.5:38.5:2.5; 48.5:10.5:39.5:1.5; 48.5:10.5:38.0:3; 47:10.5:39.5:3; 47:10:40.5:2.5; 47:11:40:2; 47:10.5:39.5:3; 48:10.5:38.5:3; 48:10:39.5:2.5; 48:11:39:2; or 48:10.5:38.5:3. In some embodiments, the delivery agent comprises Compound II or VI, DSPC, Cholesterol, and Compound I or PEG-DMG, e.g., with a mole ratio of about 47.5:10.5:39.0:3.0. In some embodiments, the delivery agent comprises Compound II or VI, DSPC, Cholesterol, and Compound I or PEG-DMG, e.g., with a mole ratio of about 50:10:38.5:1.5.

[0081] In some embodiments, the polynucleotide of the disclosure is an mRNA that comprises a 5′-terminal cap (e.g., Cap 1), a 5′UTR (e.g., SEQ ID NO: 12), a ORF sequence selected from the group consisting of SEQ ID NO: 2, 4, 6, 68-118, 120, 122, 124, 126, 128, 130, 132, 134, 136, 138, 140, 142, a 3′UTR (e.g., SEQ ID NO: 13), and a poly-A tail (e.g., about 100 nucleotides in length), wherein all uracils in the polynucleotide are N1-methylpseudouracils. In some embodiments, the delivery agent comprises Compound II or Compound VI as the ionizable lipid and PEG-DMG or Compound I as the PEG lipid.

### Signal Sequences

[0082] The polynucleotides (e.g., a RNA, e.g., an mRNA) of the invention can also comprise nucleotide sequences that encode additional features that facilitate trafficking of the encoded polypeptides to therapeutically relevant sites. One such feature that aids in protein trafficking is the signal sequence, or targeting sequence. The peptides encoded by these signal sequences are known by a variety of names, including targeting peptides, transit peptides, and signal peptides. In some embodiments, the polynucleotide (e.g., a RNA, e.g., an mRNA) comprises a nucleotide sequence (e.g., an ORF) that encodes a signal peptide operably linked to a nucleotide sequence that encodes an ABCB4, ABCB11, or ATP8B1 polypeptide described herein.

[0083] In some embodiments, the “signal sequence” or “signal peptide” is a polynucleotide or polypeptide, respectively, which is from about 30-210, e.g., about 45-80 or 15-60 nucleotides (e.g., about 20, 30, 40, 50, 60, or 70 amino acids) in length that, optionally, is incorporated at the 5′ (or N-terminus) of the coding region or the polypeptide, respectively. Addition of these sequences results in trafficking the encoded polypeptide to a desired site, such as the endoplasmic reticulum or the mitochondria through one or more targeting pathways. Some signal peptides are cleaved from the protein, for example by a signal peptidase after the proteins are transported to the desired site.

[0084] In some embodiments, the polynucleotide of the invention comprises a nucleotide sequence encoding an ABCB4, ABCB11, or ATP8B1 polypeptide, wherein the nucleotide sequence further comprises a 5′ nucleic acid sequence encoding a heterologous signal peptide.

### Fusion Proteins

[0085] In some embodiments, the polynucleotide of the invention (e.g., a RNA, e.g., an mRNA) can comprise more than one nucleic acid sequence (e.g., an ORF) encoding a polypeptide of interest. In some embodiments, polynucleotides of the invention comprise a single ORF encoding an ABCB4, ABCB11, or ATP8B1 polypeptide, a functional fragment, or a variant thereof. However, in some embodiments, the polynucleotide of the invention can comprise more than one ORF, for example, a first ORF encoding an ABCB4, ABCB11, or ATP8B1 polypeptide (a first polypeptide of interest), a functional fragment, or a variant thereof, and a second ORF expressing a second polypeptide of interest. In some embodiments, two or more polypeptides of interest can be genetically fused, i.e., two or more polypeptides can be encoded by the same ORF. In some embodiments, the polynucleotide can comprise a nucleic acid sequence encoding a linker (e.g., a G4S (SEQ ID NO: 11) peptide linker or another linker known in the art) between two or more polypeptides of interest.

[0086] In some embodiments, a polynucleotide of the invention (e.g., a RNA, e.g., an mRNA) can comprise two, three, four, or more ORFs, each expressing a polypeptide of interest. For example, a polynucleotide of the invention can comprise at least three ORFs: a first ORF encoding ABCB4, a second ORF encoding ABCB11, and a third ORF encoding ATP8B1.

[0087] In some embodiments, the polynucleotide of the invention (e.g., a RNA, e.g., an mRNA) can comprise a first nucleic acid sequence (e.g., a first ORF) encoding an ABCB4, ABCB11, or ATP8B1 polypeptide and a second nucleic acid sequence (e.g., a second ORF) encoding a second polypeptide of interest.

### Linkers and Cleavable Peptides

[0088] In certain embodiments, the mRNAs of the disclosure encode more than one ABCB4, ABCB11, or ATP8B1 domain or a heterologous domain, referred to herein as multimer constructs. In certain embodiments of the multimer constructs, the mRNA further encodes a linker located between each domain. The linker can be, for example, a cleavable linker or protease-sensitive linker. In certain embodiments, the linker is selected from the group consisting of F2A linker, P2A linker, T2A linker, ATP8B1A linker, and combinations thereof. This family of self-cleaving peptide linkers, referred to as 2A peptides, has been described in the art (see for example, Kim, J. H. et al. (2011) PLoS ONE 6:e18556). In certain embodiments, the linker is an F2A linker. In certain embodiments, the linker is a GGGS (SEQ ID NO: 240) linker. In certain embodiments, the linker is a (GGGS)n (SEQ ID NO: 241) linker, wherein n=2, 3,4, or 5. In certain embodiments, the multimer construct contains three domains with intervening linkers, having the structure: domain-linker-domain-linker-domain e.g., ABCB4, ABCB11, or ATP8B1 domain-linker-ABCB4, ABCB11, or ATP8B1 domain-linker-ABCB4, ABCB11, or ATP8B1 domain.

[0089] In one embodiment, the cleavable linker is an F2A linker (e.g., having the amino acid sequence GSGVKQTLNFDLLKLAGDVESNPGP (SEQ ID NO:242)). In other embodiments, the cleavable linker is a T2A linker (e.g., having the amino acid sequence GSGEGRGSLLTCGDVEENPGP (SEQ ID NO:243)), a P2A linker (e.g., having the amino acid sequence GSGATNFSLLKQAGDVEENPGP (SEQ ID NO:244)) or an ATP8B1A linker (e.g., having the amino acid sequence GSGQCTNYALLKLAGDVESNPGP (SEQ ID NO:245)). The skilled artisan will appreciate that other art-recognized linkers may be suitable for use in the constructs of the invention (e.g., encoded by the polynucleotides of the invention). The skilled artisan will likewise appreciate that other multicistronic constructs may be suitable for use in the invention. In exemplary embodiments, the construct design yields approximately equimolar amounts of intrabody and/or domain thereof encoded by the constructs of the invention.

[0090] In one embodiment, the self-cleaving peptide may be, but is not limited to, a 2A peptide. A variety of 2A peptides are known and available in the art and may be used, including e.g., the foot and mouth disease virus (FMDV) 2A peptide, the equine rhinitis A virus 2A peptide, the Thosea asigna virus 2A peptide, and the porcine teschovirus-1 2A peptide. 2A peptides are used by several viruses to generate two proteins from one transcript by ribosome-skipping, such that a normal peptide bond is impaired at the 2A peptide sequence, resulting in two discontinuous proteins being produced from one translation event. As a non-limiting example, the 2A peptide may have the protein sequence of SEQ ID NO:244, fragments or variants thereof. In one embodiment, the 2A peptide cleaves between the last glycine and last proline. As another non-limiting example, the polynucleotides of the present invention may include a polynucleotide sequence encoding the 2A peptide having the protein sequence of fragments or variants of SEQ ID NO:244. One example of a polynucleotide sequence encoding the 2A peptide is: GGAAGCGGAGCUACUAACUUCAGCCUGCUGAAGCAGGCUGGAGACGUGGAGG AGAACCCUGGACCU (SEQ ID NO: 246). In one illustrative embodiment, a 2A peptide is encoded by the following sequence: 5′-UCCGGACUCAGAUCCGGGGAUCUCAAAAUUGUCGCUCCUGUCAAACAAACUCU UAACUUUGAUUUACUCAAACUGGCTGGGGAUGUAGAAAGCAAUCCAGGTCCAC UC-3′ (SEQ ID NO: 247). The polynucleotide sequence of the 2A peptide may be modified or codon optimized by the methods described herein and/or are known in the art.

[0091] In one embodiment, this sequence may be used to separate the coding regions of two or more polypeptides of interest. As a non-limiting example, the sequence encoding the F2A peptide may be between a first coding region A and a second coding region B (A-F2Apep-B). The presence of the F2A peptide results in the cleavage of the one long protein between the glycine and the proline at the end of the F2A peptide sequence (NPGP is cleaved to result in NPG and P) thus creating separate protein A (with 21 amino acids of the F2A peptide attached, ending with NPG) and separate protein B (with 1 amino acid, P, of the F2A peptide attached). Likewise, for other 2A peptides (P2A, T2A and ATP8B1A), the presence of the peptide in a long protein results in cleavage between the glycine and proline at the end of the 2A peptide sequence (NPGP is cleaved to result in NPG and P). Protein A and protein B may be the same or different peptides or polypeptides of interest (e.g., an ABCB4, ABCB11, or ATP8B1 polypeptide such as full length human ABCB4, ABCB11, or ATP8B1 or a truncated version thereof.

### Sequence Optimization of Nucleotide Sequence Encoding an ABCB4, ABCB11, or ATP8B1 Polypeptide

[0092] In some embodiments, the polynucleotide (e.g., a RNA, e.g., an mRNA) of the invention is sequence optimized. In some embodiments, the polynucleotide (e.g., a RNA, e.g., an mRNA) of the invention comprises a nucleotide sequence (e.g., an ORF) encoding an ABCB4, ABCB11, or ATP8B1 polypeptide, optionally, a nucleotide sequence (e.g., an ORF) encoding another polypeptide of interest, a 5′-UTR, a 3′-UTR, the 5′ UTR or 3′ UTR optionally comprising at least one microRNA binding site, optionally a nucleotide sequence encoding a linker, a poly-A tail, or any combination thereof), in which the ORF(s) are sequence optimized.

[0093] A sequence-optimized nucleotide sequence, e.g., a codon-optimized mRNA sequence encoding an ABCB4, ABCB11, or ATP8B1 polypeptide, is a sequence comprising at least one synonymous nucleobase substitution with respect to a reference sequence (e.g., a wild type nucleotide sequence encoding an ABCB4, ABCB11, or ATP8B1 polypeptide).

[0094] A sequence-optimized nucleotide sequence can be partially or completely different in sequence from the reference sequence. For example, a reference sequence encoding polyserine uniformly encoded by UCU codons can be sequence-optimized by having 100% of its nucleobases substituted (for each codon, U in position 1 replaced by A, C in position 2 replaced by G, and U in position 3 replaced by C) to yield a sequence encoding polyserine which would be uniformly encoded by AGC codons. The percentage of sequence identity obtained from a global pairwise alignment between the reference polyserine nucleic acid sequence and the sequence-optimized polyserine nucleic acid sequence would be 0%. However, the protein products from both sequences would be 100% identical.

[0095] Some sequence optimization (also sometimes referred to codon optimization) methods are known in the art (and discussed in more detail below) and can be useful to achieve one or more desired results. These results can include, e.g., matching codon frequencies in certain tissue targets and/or host organisms to ensure proper folding; biasing G/C content to increase mRNA stability or reduce secondary structures; minimizing tandem repeat codons or base runs that can impair gene construction or expression; customizing transcriptional and translational control regions; inserting or removing protein trafficking sequences; removing/adding post translation modification sites in an encoded protein (e.g., glycosylation sites); adding, removing or shuffling protein domains; inserting or deleting restriction sites; modifying ribosome binding sites and mRNA degradation sites; adjusting translational rates to allow the various domains of the protein to fold properly; and/or reducing or eliminating problem secondary structures within the polynucleotide. Sequence optimization tools, algorithms and services are known in the art, non-limiting examples include services from GeneArt (Life Technologies), DNA2.0 (Menlo Park Calif.) and/or proprietary methods.

[0096] Codon options for each amino acid are given in TABLE 1.

TABLE 1
Codon Options

| Amino Acid | Single Letter Code | Codon Options |
|---|---|---|
| Isoleucine | I | AUU, AUC, AUA |
| Leucine | L | CUU, CUC, CUA, CUG, UUA, |
| | | UUG |
| Valine | V | GUU, GUC, GUA, GUG |
| Phenylalanine | F | UUU, UUC |
| Methionine | M | AUG |
| Cysteine | C | UGU, UGC |
| Alanine | A | GCU, GCC, GCA, GCG |
| Glycine | G | GGU, GGC, GGA, GGG |
| Proline | P | CCU, CCC, CCA, CCG |
| Threonine | T | ACU, ACC, ACA, ACG |
| Serine | S | UCU, UCC, UCA, UCG, AGU, |
| | | AGC |
| Tyrosine | Y | UAU, UAC |
| Tryptophan | W | UGG |
| Glutamine | Q | CAA, CAG |
| Asparagine | N | AAU, AAC |
| Histidine | H | CAU, CAC |
| Glutamic acid | E | GAA, GAG |
| Aspartic acid | D | GAU, GAC |
| Lysine | K | AAA, AAG |
| Arginine | R | CGU, CGC, CGA, CGG, AGA, |
| | | AGG |
| Selenocysteine | Sec | UGA in mRNA in presence of |
| | | Selenocysteine insertion |
| | | element (SECIS) |
| Stop codons | Stop | UAA, UAG, UGA |

[0097] In some embodiments, a polynucleotide (e.g., a RNA, e.g., an mRNA) of the invention comprises a sequence-optimized nucleotide sequence (e.g., an ORF) encoding an ABCB4, ABCB11, or ATP8B1 polypeptide, a functional fragment, or a variant thereof, wherein the ABCB4, ABCB11, or ATP8B1 polypeptide, functional fragment, or a variant thereof encoded by the sequence-optimized nucleotide sequence has improved properties (e.g., compared to an ABCB4, ABCB11, or ATP8B1polypeptide, functional fragment, or a variant thereof encoded by a reference nucleotide sequence that is not sequence optimized), e.g., improved properties related to expression efficacy after administration in vivo. Such properties include, but are not limited to, improving nucleic acid stability (e.g., mRNA stability), increasing translation efficacy in the target tissue, reducing the number of truncated proteins expressed, improving the folding or prevent misfolding of the expressed proteins, reducing toxicity of the expressed products, reducing cell death caused by the expressed products, increasing and/or decreasing protein aggregation.

[0098] In some embodiments, the sequence-optimized nucleotide sequence (e.g., an ORF) is codon optimized for expression in human subjects, having structural and/or chemical features that avoid one or more of the problems in the art, for example, features which are useful for optimizing formulation and delivery of nucleic acid-based therapeutics while retaining structural and functional integrity; overcoming a threshold of expression; improving expression rates; half-life and/or protein concentrations; optimizing protein localization; and avoiding deleterious bio-responses such as the immune response and/or degradation pathways.

[0099] In some embodiments, the polynucleotides of the invention comprise a nucleotide sequence (e.g., a nucleotide sequence (e.g., an ORF) encoding an ABCB4, ABCB11, or ATP8B1 polypeptide, a nucleotide sequence (e.g., an ORF) encoding another polypeptide of interest, a 5′-UTR, a 3′-UTR, a microRNA binding site, a nucleic acid sequence encoding a linker, or any combination thereof) that is sequence-optimized according to a method comprising: substituting at least one codon in a reference nucleotide sequence (e.g., an ORF encoding an ABCB4, ABCB11, or ATP8B1 polypeptide) with an alternative codon to increase or decrease uridine content to generate a uridine-modified sequence; substituting at least one codon in a reference nucleotide sequence (e.g., an ORF encoding an ABCB4, ABCB11, or ATP8B1 polypeptide) with an alternative codon having a higher codon frequency in the synonymous codon set; substituting at least one codon in a reference nucleotide sequence (e.g., an ORF encoding an ABCB4, ABCB11, or ATP8B1 polypeptide) with an alternative codon to increase G/C content; or a combination thereof.

[0100] In some embodiments, the sequence-optimized nucleotide sequence (e.g., an ORF encoding an ABCB4, ABCB11, or ATP8B1 polypeptide) has at least one improved property with respect to the reference nucleotide sequence.

[0101] In some embodiments, the sequence optimization method is multiparametric and comprises one, two, three, four, or more methods disclosed herein and/or other optimization methods known in the art.

[0102] Features, which can be considered beneficial in some embodiments of the invention, can be encoded by or within regions of the polynucleotide and such regions can be upstream (5′) to, downstream (3′) to, or within the region that encodes the ABCB4, ABCB11, or ATP8B1 polypeptide. These regions can be incorporated into the polynucleotide before and/or after sequence-optimization of the protein encoding region or open reading frame (ORF). Examples of such features include, but are not limited to, untranslated regions (UTRs), microRNA sequences, Kozak sequences, oligo(dT) sequences, poly-A tail, and detectable tags and can include multiple cloning sites that can have XbaI recognition.

[0103] In some embodiments, the polynucleotide of the invention comprises a 5′ UTR, a 3′ UTR and/or a microRNA binding site. In some embodiments, the polynucleotide comprises two or more 5′ UTRs and/or 3′ UTRs, which can be the same or different sequences. In some embodiments, the polynucleotide comprises two or more microRNA binding sites, which can be the same or different sequences. Any portion of the 5′ UTR, 3′ UTR, and/or microRNA binding site, including none, can be sequence-optimized and can independently contain one or more different structural or chemical modifications, before and/or after sequence optimization.

[0104] In some embodiments, after optimization, the polynucleotide is reconstituted and transformed into a vector such as, but not limited to, plasmids, viruses, cosmids, and artificial chromosomes. For example, the optimized polynucleotide can be reconstituted and transformed into chemically competent E. coli, yeast, neurospora, maize, drosophila, etc. where high copy plasmid-like or chromosome structures occur by methods described herein.

### Sequence-Optimized Nucleotide Sequences Encoding ABCB4, ABCB11, or ATP8B1 Polypeptides

[0105] In some embodiments, the polynucleotide of the invention comprises a sequence-optimized nucleotide sequence encoding an ABCB4, ABCB11, or ATP8B1 polypeptide disclosed herein. In some embodiments, the polynucleotide of the invention comprises an open reading frame (ORF) encoding an ABCB4, ABCB11, or ATP8B1 polypeptide, wherein the ORF has been sequence optimized.

[0106] Exemplary sequence-optimized nucleotide sequences encoding human ABCB4 are set forth as SEQ ID NOs: 68-92, 118, 120, 122, and 124. Exemplary sequence-optimized nucleotide sequences encoding human ABCB11 are set forth as SEQ ID NOs: 126, 128, 130, 132, 134, 136, 138, 140, and 142. Exemplary sequence-optimized nucleotide sequences encoding human ATP8B1 are set forth as SEQ ID NOs: 93-117. In some embodiments, the sequence optimized ABCB4, ABCB11, or ATP8B1 sequences, fragments, and variants thereof are used to practice the methods disclosed herein.

[0107] In some embodiments, a polynucleotide of the present disclosure, for example a polynucleotide comprising an mRNA nucleotide sequence encoding an ABCB4, ABCB11, or ATP8B1 polypeptide, comprises from 5′ to 3′ end: a 5′ cap provided herein, for example, Cap 1; a 5′ UTR, such as the sequences provided herein, for example, SEQ ID NO: 12; an open reading frame encoding an ABCB4, ABCB11, or ATP8B1 polypeptide, e.g., a sequence optimized nucleic acid sequence encoding ABCB4, ABCB11, or ATP8B1 set forth as SEQ ID NOs: 68-117, 118, 120, 122, 124, 126, 128, 130, 132, 134, 136, 138, 140, and 142; at least one stop codon (if not present at 5′ terminus of 3′UTR); a 3′ UTR, such as the sequences provided herein, for example, SEQ ID NO: 13, 206-222; and a poly-A tail provided above.

[0108] In certain embodiments, all uracils in the polynucleotide are N1-methylpseudouracil. In certain embodiments, all uracils in the polynucleotide are 5-methoxyuracil.

[0109] The sequence-optimized nucleotide sequences disclosed herein are distinct from the corresponding wild type nucleotide acid sequences and from other known sequence-optimized nucleotide sequences, e.g., these sequence-optimized nucleic acids have unique compositional characteristics.

[0110] In some embodiments, the percentage of uracil or thymine nucleobases in a sequence-optimized nucleotide sequence (e.g., encoding an ABCB4, ABCB11, or ATP8B1 polypeptide, a functional fragment, or a variant thereof) is modified (e.g., reduced) with respect to the percentage of uracil or thymine nucleobases in the reference wild-type nucleotide sequence. Such a sequence is referred to as a uracil-modified or thymine-modified sequence. The percentage of uracil or thymine content in a nucleotide sequence can be determined by dividing the number of uracils or thymines in a sequence by the total number of nucleotides and multiplying by 100. In some embodiments, the sequence-optimized nucleotide sequence has a lower uracil or thymine content than the uracil or thymine content in the reference wild-type sequence. In some embodiments, the uracil or thymine content in a sequence-optimized nucleotide sequence of the invention is greater than the uracil or thymine content in the reference wild-type sequence and still maintain beneficial effects, e.g., increased expression and/or reduced Toll-Like Receptor (TLR) response when compared to the reference wild-type sequence.

[0111] Methods for optimizing codon usage are known in the art. For example, an ORF of any one or more of the sequences provided herein may be codon optimized. Codon optimization, in some embodiments, may be used to match codon frequencies in target and host organisms to ensure proper folding; bias GC content to increase mRNA stability or reduce secondary structures; minimize tandem repeat codons or base runs that may impair gene construction or expression; customize transcriptional and translational control regions; insert or remove protein trafficking sequences; remove/add post translation modification sites in encoded protein (e.g., glycosylation sites); add, remove or shuffle protein domains; insert or delete restriction sites; modify ribosome binding sites and mRNA degradation sites; adjust translational rates to allow the various domains of the protein to fold properly; or reduce or eliminate problem secondary structures within the polynucleotide. Codon optimization tools, algorithms and services are known in the art—non-limiting examples include services from GeneArt (Life Technologies), DNA2.0 (Menlo Park CA) and/or proprietary methods. In some embodiments, the open reading frame (ORF) sequence is optimized using optimization algorithms.

### Characterization of Sequence Optimized Nucleic Acids

[0112] In some embodiments of the invention, the polynucleotide (e.g., a RNA, e.g., an mRNA) comprising a sequence optimized nucleic acid disclosed herein encoding an ABCB4, ABCB11, or ATP8B1 polypeptide can be tested to determine whether at least one nucleic acid sequence property (e.g., stability when exposed to nucleases) or expression property has been improved with respect to the non-sequence optimized nucleic acid.

[0113] As used herein, “expression property” refers to a property of a nucleic acid sequence either in vivo (e.g., translation efficacy of a synthetic mRNA after administration to a subject in need thereof) or in vitro (e.g., translation efficacy of a synthetic mRNA tested in an in vitro model system). Expression properties include but are not limited to the amount of protein produced by an mRNA encoding an ABCB4, ABCB11, or ATP8B1 polypeptide after administration, and the amount of soluble or otherwise functional protein produced. In some embodiments, sequence optimized nucleic acids disclosed herein can be evaluated according to the viability of the cells expressing a protein encoded by a sequence optimized nucleic acid sequence (e.g., a RNA, e.g., an mRNA) encoding an ABCB4, ABCB11, or ATP8B1 polypeptide disclosed herein.

[0114] In a particular embodiment, a plurality of sequence optimized nucleic acids disclosed herein (e.g., a RNA, e.g., an mRNA) containing codon substitutions with respect to the non-optimized reference nucleic acid sequence can be characterized functionally to measure a property of interest, for example an expression property in an in vitro model system, or in vivo in a target tissue or cell.

### Optimization of Nucleic Acid Sequence Intrinsic Properties

[0115] In some embodiments of the invention, the desired property of the polynucleotide is an intrinsic property of the nucleic acid sequence. For example, the nucleotide sequence (e.g., a RNA, e.g., an mRNA) can be sequence optimized for in vivo or in vitro stability. In some embodiments, the nucleotide sequence can be sequence optimized for expression in a particular target tissue or cell. In some embodiments, the nucleic acid sequence is sequence optimized to increase its plasma half-life by preventing its degradation by endo and exonucleases.

[0116] In other embodiments, the nucleic acid sequence is sequence optimized to increase its resistance to hydrolysis in solution, for example, to lengthen the time that the sequence optimized nucleic acid or a pharmaceutical composition comprising the sequence optimized nucleic acid can be stored under aqueous conditions with minimal degradation.

[0117] In other embodiments, the sequence optimized nucleic acid can be optimized to increase its resistance to hydrolysis in dry storage conditions, for example, to lengthen the time that the sequence optimized nucleic acid can be stored after lyophilization with minimal degradation.

### Nucleic Acids Sequence Optimized for Protein Expression

[0118] In some embodiments of the invention, the desired property of the polynucleotide is the level of expression of an ABCB4, ABCB11, or ATP8B1 polypeptide encoded by a sequence optimized sequence disclosed herein. Protein expression levels can be measured using one or more expression systems. In some embodiments, expression can be measured in cell culture systems, e.g., CHO cells or HEK293 cells. In some embodiments, expression can be measured using in vitro expression systems prepared from extracts of living cells, e.g., rabbit reticulocyte lysates, or in vitro expression systems prepared by assembly of purified individual components. In other embodiments, the protein expression is measured in an in vivo system, e.g., mouse, rabbit, monkey, etc.

[0119] In some embodiments, protein expression in solution form can be desirable. Accordingly, in some embodiments, a reference sequence can be sequence optimized to yield a sequence optimized nucleic acid sequence having optimized levels of expressed proteins in soluble form. Levels of protein expression and other properties such as solubility, levels of aggregation, and the presence of truncation products (i.e., fragments due to proteolysis, hydrolysis, or defective translation) can be measured according to methods known in the art, for example, using electrophoresis (e.g., native or SDS-PAGE) or chromatographic methods (e.g., HPLC, size exclusion chromatography, etc.).

### Optimization of Target Tissue or Target Cell Viability

[0120] In some embodiments, the expression of heterologous therapeutic proteins encoded by a nucleic acid sequence can have deleterious effects in the target tissue or cell, reducing protein yield, or reducing the quality of the expressed product (e.g., due to the presence of protein fragments or precipitation of the expressed protein in inclusion bodies), or causing toxicity.

[0121] Accordingly, in some embodiments of the invention, the sequence optimization of a nucleic acid sequence disclosed herein, e.g., a nucleic acid sequence encoding an ABCB4, ABCB11, or ATP8B1 polypeptide, can be used to increase the viability of target cells expressing the protein encoded by the sequence optimized nucleic acid.

[0122] Heterologous protein expression can also be deleterious to cells transfected with a nucleic acid sequence for autologous or heterologous transplantation. Accordingly, in some embodiments of the present disclosure the sequence optimization of a nucleic acid sequence disclosed herein can be used to increase the viability of target cells expressing the protein encoded by the sequence optimized nucleic acid sequence. Changes in cell or tissue viability, toxicity, and other physiological reaction can be measured according to methods known in the art.

Reduction of Immune and/or Inflammatory Response

[0123] In some cases, the administration of a sequence optimized nucleic acid encoding ABCB4, ABCB11, or ATP8B1 polypeptide or a functional fragment thereof can trigger an immune response, which could be caused by (i) the therapeutic agent (e.g., an mRNA encoding an ABCB4, ABCB11, or ATP8B1 polypeptide), or (ii) the expression product of such therapeutic agent (e.g., the ABCB4, ABCB11, or ATP8B1 polypeptide encoded by the mRNA), or (iv) a combination thereof. Accordingly, in some embodiments of the present disclosure the sequence optimization of nucleic acid sequence (e.g., an mRNA) disclosed herein can be used to decrease an immune or inflammatory response triggered by the administration of a nucleic acid encoding an ABCB4, ABCB11, or ATP8B1 polypeptide or by the expression product of ABCB4, ABCB11, or ATP8B1 encoded by such nucleic acid.

[0124] In some aspects, an inflammatory response can be measured by detecting increased levels of one or more inflammatory cytokines using methods known in the art, e.g., ELISA. The term “inflammatory cytokine” refers to cytokines that are elevated in an inflammatory response. Examples of inflammatory cytokines include interleukin-6 (IL-6), CXCL1 (chemokine (C-X-C motif) ligand 1; also known as GROα, interferon-γ (IFNγ), tumor necrosis factor α (TNFα), interferon γ-induced protein 10 (IP-10), or granulocyte-colony stimulating factor (G-CSF). The term inflammatory cytokines includes also other cytokines associated with inflammatory responses known in the art, e.g., interleukin-1 (IL-1), interleukin-8 (IL-8), interleukin-12 (IL-12), interleukin-13 (I1-13), interferon α (IFN-α), etc.

### Modified Nucleotide Sequences Encoding ABCB4, ABCB11, or ATP8B1 Polypeptides

[0125] In some embodiments, the polynucleotide (e.g., a RNA, e.g., an mRNA) of the invention comprises a chemically modified nucleobase, for example, a chemically modified uracil, e.g., pseudouracil, N1-methylpseudouracil, 5-methoxyuracil, or the like. In some embodiments, the mRNA is a uracil-modified sequence comprising an ORF encoding an ABCB4, ABCB11, or ATP8B1 polypeptide, wherein the mRNA comprises a chemically modified nucleobase, for example, a chemically modified uracil, e.g., pseudouracil, N1-methylpseudouracil, or 5-methoxyuracil.

[0126] In certain aspects of the invention, when the modified uracil base is connected to a ribose sugar, as it is in polynucleotides, the resulting modified nucleoside or nucleotide is referred to as modified uridine. In some embodiments, uracil in the polynucleotide is at least about 25%, at least about 30%, at least about 40%, at least about 50%, at least about 60%, at least about 70%, at least about 80%, at least 90%, at least 95%, at least 99%, or about 100% modified uracil. In one embodiment, uracil in the polynucleotide is at least 95% modified uracil. In another embodiment, uracil in the polynucleotide is 100% modified uracil.

[0127] In embodiments where uracil in the polynucleotide is at least 95% modified uracil overall uracil content can be adjusted such that an mRNA provides suitable protein expression levels while inducing little to no immune response. In some embodiments, the uracil content of the ORF is between about 100% and about 150%, between about 100% and about 110%, between about 105% and about 115%, between about 110% and about 120%, between about 115% and about 125%, between about 120% and about 130%, between about 125% and about 135%, between about 130% and about 140%, between about 135% and about 145%, between about 140% and about 150% of the theoretical minimum uracil content in the corresponding wild-type ORF (%Unvi). In other embodiments, the uracil content of the ORF is between about 121% and about 136% or between 123% and 134% of the %Unvi. In some embodiments, the uracil content of the ORF encoding an ABCB4, ABCB11, or ATP8B1 polypeptide is about 115%, about 120%, about 125%, about 130%, about 135%, about 140%, about 145%, or about 150% of the %UTAT. In this context, the term “uracil” can refer to modified uracil and/or naturally occurring uracil.

[0128] In some embodiments, the uracil content in the ORF of the mRNA encoding an ABCB4, ABCB11, or ATP8B1 polypeptide of the invention is less than about 30%, about 25%, about 20%, about 15%, or about 10% of the total nucleobase content in the ORF. In some embodiments, the uracil content in the ORF is between about 10% and about 20% of the total nucleobase content in the ORF. In other embodiments, the uracil content in the ORF is between about 10% and about 25% of the total nucleobase content in the ORF. In one embodiment, the uracil content in the ORF of the mRNA encoding an ABCB4, ABCB11, or ATP8B1 polypeptide is less than about 20% of the total nucleobase content in the open reading frame. In this context, the term “uracil” can refer to modified uracil and/or naturally occurring uracil.

[0129] In further embodiments, the ORF of the mRNA encoding an ABCB4, ABCB11, or ATP8B1 polypeptide having modified uracil and adjusted uracil content has increased Cytosine (C), Guanine (G), or Guanine/Cytosine (G/C) content (absolute or relative). In some embodiments, the overall increase in C, G, or G/C content (absolute or relative) of the ORF is at least about 2%, at least about 3%, at least about 4%, at least about 5%, at least about 6%, at least about 7%, at least about 10%, at least about 15%, at least about 20%, at least about 40%, at least about 50%, at least about 60%, at least about 70%, at least about 80%, at least about 90%, at least about 95%, or at least about 100% relative to the G/C content (absolute or relative) of the wild-type ORF. In some embodiments, the G, the C, or the G/C content in the ORF is less than about 100%, less than about 90%, less than about 85%, or less than about 80% of the theoretical maximum G, C, or G/C content of the corresponding wild type nucleotide sequence encoding the ABCB4, ABCB11, or ATP8B1 polypeptide (%Gm4x; %Cm4x, or %G/Cm4x). In some embodiments, the increases in G and/or C content (absolute or relative) described herein can be conducted by replacing synonymous codons with low G, C, or G/C content with synonymous codons having higher G, C, or G/C content. In other embodiments, the increase in G and/or C content (absolute or relative) is conducted by replacing a codon ending with U with a synonymous codon ending with G or C.

[0130] In further embodiments, the ORF of the mRNA encoding an ABCB4, ABCB11, or ATP8B1 polypeptide of the invention comprises modified uracil and has an adjusted uracil content containing less uracil pairs (UU) and/or uracil triplets (UUU) and/or uracil quadruplets (UUUU) than the corresponding wild-type nucleotide sequence encoding the ABCB4, ABCB11, or ATP8B1 polypeptide. In some embodiments, the ORF of the mRNA encoding an ABCB4, ABCB11, or ATP8B1 polypeptide of the invention contains no uracil pairs and/or uracil triplets and/or uracil quadruplets. In some embodiments, uracil pairs and/or uracil triplets and/or uracil quadruplets are reduced below a certain threshold, e.g., no more than 1, 2, 3, 4, 5, 6, 7, 8, 9, 10, 11, 12, 13, 14, 15, 16, 17, 18, 19, or 20 occurrences in the ORF of the mRNA encoding the ABCB4, ABCB11, or ATP8B1 polypeptide. In a particular embodiment, the ORF of the mRNA encoding the ABCB4, ABCB11, or ATP8B1 polypeptide of the invention contains less than 20, 19, 18, 17, 16, 15, 14, 13, 12, 11, 10, 9, 8, 7, 6, 5, 4, 3, 2, or 1 non-phenylalanine uracil pairs and/or triplets. In another embodiment, the ORF of the mRNA encoding the ABCB4, ABCB11, or ATP8B1 polypeptide contains no non-phenylalanine uracil pairs and/or triplets.

[0131] In further embodiments, the ORF of the mRNA encoding an ABCB4, ABCB11, or ATP8B1 polypeptide of the invention comprises modified uracil and has an adjusted uracil content containing less uracil-rich clusters than the corresponding wild-type nucleotide sequence encoding the ABCB4, ABCB11, or ATP8B1 polypeptide. In some embodiments, the ORF of the mRNA encoding the ABCB4, ABCB11, or ATP8B1 polypeptide of the invention contains uracil-rich clusters that are shorter in length than corresponding uracil-rich clusters in the corresponding wild-type nucleotide sequence encoding the ABCB4, ABCB11, or ATP8B1 polypeptide.

[0132] In further embodiments, alternative lower frequency codons are employed. At least about 5%, at least about 10%, at least about 15%, at least about 20%, at least about 25%, at least about 30%, at least about 35%, at least about 40%, at least about 45%, at least about 50%, at least about 55%, at least about 60%, at least about 65%, at least about 70%, at least about 75%, at least about 80%, at least about 85%, at least about 90%, at least about 95%, at least about 99%, or 100% of the codons in the ABCB4, ABCB11, or ATP8B1 polypeptide-encoding ORF of the modified uracil-comprising mRNA are substituted with alternative codons, each alternative codon having a codon frequency lower than the codon frequency of the substituted codon in the synonymous codon set. The ORF also has adjusted uracil content, as described above. In some embodiments, at least one codon in the ORF of the mRNA encoding the ABCB4, ABCB11, or ATP8B1 polypeptide is substituted with an alternative codon having a codon frequency lower than the codon frequency of the substituted codon in the synonymous codon set.

[0133] In some embodiments, the adjusted uracil content, ABCB4, ABCB11, or ATP8B1 polypeptide-encoding ORF of the modified uracil-comprising mRNA exhibits expression levels of ABCB4, ABCB11, or ATP8B1 when administered to a mammalian cell that are higher than expression levels of ABCB4, ABCB11, or ATP8B1 from the corresponding wild-type mRNA. In some embodiments, the mammalian cell is a mouse cell, a rat cell, or a rabbit cell. In other embodiments, the mammalian cell is a monkey cell or a human cell. In some embodiments, the human cell is a HeLa cell, a BJ fibroblast cell, or a peripheral blood mononuclear cell (PBMC). In some embodiments, ABCB4, ABCB11, or ATP8B1 is expressed at a level higher than expression levels of ABCB4, ABCB11, or ATP8B1 from the corresponding wild-type mRNA when the mRNA is administered to a mammalian cell in vivo. In some embodiments, the mRNA is administered to mice, rabbits, rats, monkeys, or humans. In one embodiment, mice are null mice. In some embodiments, the mRNA is administered to mice in an amount of about 0.01 mg/kg, about 0.05 mg/kg, about 0.1 mg/kg, or 0.2 mg/kg or about 0.5 mg/kg. In some embodiments, the mRNA is administered intravenously or intramuscularly. In other embodiments, the ABCB4, ABCB11, or ATP8B1 polypeptide is expressed when the mRNA is administered to a mammalian cell in vitro. In some embodiments, the expression is increased by at least about 2-fold, at least about 5-fold, at least about 10-fold, at least about 50-fold, at least about 500-fold, at least about 1500-fold, or at least about 3000-fold. In other embodiments, the expression is increased by at least about 10%, about 20%, about 30%, about 40%, about 50%, 60%, about 70%, about 80%, about 90%, or about 100%.

[0134] In some embodiments, adjusted uracil content, ABCB4, ABCB11, or ATP8B1 polypeptide-encoding ORF of the modified uracil-comprising mRNA exhibits increased stability. In some embodiments, the mRNA exhibits increased stability in a cell relative to the stability of a corresponding wild-type mRNA under the same conditions. In some embodiments, the mRNA exhibits increased stability including resistance to nucleases, thermal stability, and/or increased stabilization of secondary structure. In some embodiments, increased stability exhibited by the mRNA is measured by determining the half-life of the mRNA (e.g., in a plasma, serum, cell, or tissue sample) and/or determining the area under the curve (AUC) of the protein expression by the mRNA over time (e.g., in vitro or in vivo). An mRNA is identified as having increased stability if the half-life and/or the AUC is greater than the half-life and/or the AUC of a corresponding wild-type mRNA under the same conditions.

[0135] In some embodiments, the mRNA of the present invention induces a detectably lower immune response (e.g., innate or acquired) relative to the immune response induced by a corresponding wild-type mRNA under the same conditions. In other embodiments, the mRNA of the present disclosure induces a detectably lower immune response (e.g., innate or acquired) relative to the immune response induced by an mRNA that encodes for an ABCB4, ABCB11, or ATP8B1 polypeptide but does not comprise modified uracil under the same conditions, or relative to the immune response induced by an mRNA that encodes for an ABCB4, ABCB11, or ATP8B1 polypeptide and that comprises modified uracil but that does not have adjusted uracil content under the same conditions. The innate immune response can be manifested by increased expression of pro-inflammatory cytokines, activation of intracellular PRRs (RIG-I, MDA5, etc.), cell death, and/or termination or reduction in protein translation. In some embodiments, a reduction in the innate immune response can be measured by expression or activity level of Type 1 interferons (e.g., IFN-α, IFN-β, IFN-κ, IFN-δ, IFN-ε, IFN-τ, IFN-ω, and IFN-ζ or the expression of interferon-regulated genes such as the toll-like receptors (e.g., TLR7 and TLR8), and/or by decreased cell death following one or more administrations of the mRNA of the invention into a cell.

[0136] In some embodiments, the expression of Type-1 interferons by a mammalian cell in response to the mRNA of the present disclosure is reduced by at least 10%, 20%, 30%, 40%, 50%, 60%, 70%, 80%, 90%, 95%, 99%, 99.9%, or greater than 99.9% relative to a corresponding wild-type mRNA, to an mRNA that encodes an ABCB4, ABCB11, or ATP8B1 polypeptide but does not comprise modified uracil, or to an mRNA that encodes an ABCB4, ABCB11, or ATP8B1 polypeptide and that comprises modified uracil but that does not have adjusted uracil content. In some embodiments, the interferon is IFN-β. In some embodiments, cell death frequency caused by administration of mRNA of the present disclosure to a mammalian cell is 10%, 25%, 50%, 75%, 85%, 90%, 95%, or over 95% less than the cell death frequency observed with a corresponding wild-type mRNA, an mRNA that encodes for an ABCB4, ABCB11, or ATP8B1 polypeptide but does not comprise modified uracil, or an mRNA that encodes for an ABCB4, ABCB11, or ATP8B1 polypeptide and that comprises modified uracil but that does not have adjusted uracil content. In some embodiments, the mammalian cell is a BJ fibroblast cell. In other embodiments, the mammalian cell is a splenocyte. In some embodiments, the mammalian cell is that of a mouse or a rat. In other embodiments, the mammalian cell is that of a human. In one embodiment, the mRNA of the present disclosure does not substantially induce an innate immune response of a mammalian cell into which the mRNA is introduced.

### Methods for Modifying Polynucleotides

[0137] The disclosure includes modified polynucleotides comprising a polynucleotide described herein (e.g., a polynucleotide, e.g. mRNA, comprising a nucleotide sequence encoding an ABCB4, ABCB11, or ATP8B1 polypeptide). The modified polynucleotides can be chemically modified and/or structurally modified. When the polynucleotides of the present invention are chemically and/or structurally modified the polynucleotides can be referred to as “modified polynucleotides.”

[0138] The present disclosure provides for modified nucleosides and nucleotides of a polynucleotide (e.g., RNA polynucleotides, such as mRNA polynucleotides) encoding an ABCB4, ABCB11, or ATP8B1 polypeptide. A “nucleoside” refers to a compound containing a sugar molecule (e.g., a pentose or ribose) or a derivative thereof in combination with an organic base (e.g., a purine or pyrimidine) or a derivative thereof (also referred to herein as “nucleobase”). A “nucleotide” refers to a nucleoside including a phosphate group. Modified nucleotides can be synthesized by any useful method, such as, for example, chemically, enzymatically, or recombinantly, to include one or more modified or non-natural nucleosides. Polynucleotides can comprise a region or regions of linked nucleosides. Such regions can have variable backbone linkages. The linkages can be standard phosphodiester linkages, in which case the polynucleotides would comprise regions of nucleotides.

[0139] The modified polynucleotides disclosed herein can comprise various distinct modifications. In some embodiments, the modified polynucleotides contain one, two, or more (optionally different) nucleoside or nucleotide modifications. In some embodiments, a modified polynucleotide, introduced to a cell can exhibit one or more desirable properties, e.g., improved protein expression, reduced immunogenicity, or reduced degradation in the cell, as compared to an unmodified polynucleotide.

[0140] In some embodiments, a polynucleotide of the present invention (e.g., a polynucleotide comprising a nucleotide sequence encoding an ABCB4, ABCB11, or ATP8B1 polypeptide) is structurally modified. As used herein, a “structural” modification is one in which two or more linked nucleosides are inserted, deleted, duplicated, inverted or randomized in a polynucleotide without significant chemical modification to the nucleotides themselves. Because chemical bonds will necessarily be broken and reformed to effect a structural modification, structural modifications are of a chemical nature and hence are chemical modifications. However, structural modifications will result in a different sequence of nucleotides. For example, the polynucleotide “ATCG” can be chemically modified to “AT-5meC-G”. The same polynucleotide can be structurally modified from “ATCG” to “ATCCCG”. Here, the dinucleotide “CC” has been inserted, resulting in a structural modification to the polynucleotide.

[0141] Therapeutic compositions of the present disclosure comprise, in some embodiments, at least one nucleic acid (e.g., RNA) having an open reading frame encoding ABCB4, ABCB11, or ATP8B1 (e.g., SEQ ID NOs: 1, 3, 5, 7, or 9), wherein the nucleic acid comprises nucleotides and/or nucleosides that can be standard (unmodified) or modified as is known in the art. In some embodiments, nucleotides and nucleosides of the present disclosure comprise modified nucleotides or nucleosides. Such modified nucleotides and nucleosides can be naturally-occurring modified nucleotides and nucleosides or non-naturally occurring modified nucleotides and nucleosides. Such modifications can include those at the sugar, backbone, or nucleobase portion of the nucleotide and/or nucleoside as are recognized in the art.

[0142] In some embodiments, a naturally-occurring modified nucleotide or nucleotide of the disclosure is one as is generally known or recognized in the art. Non-limiting examples of such naturally occurring modified nucleotides and nucleotides can be found, inter alia, in the widely recognized MODOMICS database.

[0143] In some embodiments, a non-naturally occurring modified nucleotide or nucleoside of the disclosure is one as is generally known or recognized in the art. Non-limiting examples of such non-naturally occurring modified nucleotides and nucleosides can be found, inter alia, in published US application Nos. PCT/US2012/058519; PCT/US2013/075177; PCT/US2014/058897; PCT/U52014/058891; PCT/U52014/070413; PCT/US2015/36773; PCT/US2015/36759; PCT/US2015/36771; or PCT/IB2017/051367 all of which are incorporated by reference herein.

[0144] In some embodiments, at least one RNA (e.g., mRNA) of the present disclosure is not chemically modified and comprises the standard ribonucleotides consisting of adenosine, guanosine, cytosine and uridine. In some embodiments, nucleotides and nucleosides of the present disclosure comprise standard nucleoside residues such as those present in transcribed RNA (e.g. A, G, C, or U). In some embodiments, nucleotides and nucleosides of the present disclosure comprise standard deoxyribonucleosides such as those present in DNA (e.g. dA, dG, dC, or dT).

[0145] Hence, nucleic acids of the disclosure (e.g., DNA nucleic acids and RNA nucleic acids, such as mRNA nucleic acids) can comprise standard nucleotides and nucleosides, naturally-occurring nucleotides and nucleosides, non-naturally-occurring nucleotides and nucleosides, or any combination thereof.

[0146] Nucleic acids of the disclosure (e.g., DNA nucleic acids and RNA nucleic acids, such as mRNA nucleic acids), in some embodiments, comprise various (more than one) different types of standard and/or modified nucleotides and nucleosides. In some embodiments, a particular region of a nucleic acid contains one, two or more (optionally different) types of standard and/or modified nucleotides and nucleosides.

[0147] In some embodiments, a modified RNA nucleic acid (e.g., a modified mRNA nucleic acid), introduced to a cell or organism, exhibits reduced degradation in the cell or organism, respectively, relative to an unmodified nucleic acid comprising standard nucleotides and nucleosides.

[0148] In some embodiments, a modified RNA nucleic acid (e.g., a modified mRNA nucleic acid), introduced into a cell or organism, may exhibit reduced immunogenicity in the cell or organism, respectively (e.g., a reduced innate response) relative to an unmodified nucleic acid comprising standard nucleotides and nucleosides.

[0149] Nucleic acids (e.g., RNA nucleic acids, such as mRNA nucleic acids), in some embodiments, comprise non-natural modified nucleotides that are introduced during synthesis or post-synthesis of the nucleic acids to achieve desired functions or properties. The modifications may be present on internucleotide linkages, purine or pyrimidine bases, or sugars. The modification may be introduced with chemical synthesis or with a polymerase enzyme at the terminal of a chain or anywhere else in the chain. Any of the regions of a nucleic acid may be chemically modified.

[0150] The present disclosure provides for modified nucleosides and nucleotides of a nucleic acid (e.g., RNA nucleic acids, such as mRNA nucleic acids). A “nucleoside” refers to a compound containing a sugar molecule (e.g., a pentose or ribose) or a derivative thereof in combination with an organic base (e.g., a purine or pyrimidine) or a derivative thereof (also referred to herein as “nucleobase”). A “nucleotide” refers to a nucleoside, including a phosphate group. Modified nucleotides may by synthesized by any useful method, such as, for example, chemically, enzymatically, or recombinantly, to include one or more modified or non-natural nucleosides. Nucleic acids can comprise a region or regions of linked nucleosides. Such regions may have variable backbone linkages. The linkages can be standard phosphodiester linkages, in which case the nucleic acids would comprise regions of nucleotides.

[0151] Modified nucleotide base pairing encompasses not only the standard adenosine-thymine, adenosine-uracil, or guanosine-cytosine base pairs, but also base pairs formed between nucleotides and/or modified nucleotides comprising non-standard or modified bases, wherein the arrangement of hydrogen bond donors and hydrogen bond acceptors permits hydrogen bonding between a non-standard base and a standard base or between two complementary non-standard base structures, such as, for example, in those nucleic acids having at least one chemical modification. One example of such non-standard base pairing is the base pairing between the modified nucleotide inosine and adenine, cytosine or uracil. Any combination of base/sugar or linker may be incorporated into nucleic acids of the present disclosure.

[0152] In some embodiments, modified nucleobases in nucleic acids (e.g., RNA nucleic acids, such as mRNA nucleic acids) comprise N1-methyl-pseudouridine (m1ψ), 1-ethyl-pseudouridine (e1ψ), 5-methoxy-uridine (mo5U), 5-methyl-cytidine (m5C), and/or pseudouridine (ψ). In some embodiments, modified nucleobases in nucleic acids (e.g., RNA nucleic acids, such as mRNA nucleic acids) comprise 5-methoxymethyl uridine, 5-methylthio uridine, 1-methoxymethyl pseudouridine, 5-methyl cytidine, and/or 5-methoxy cytidine. In some embodiments, the polyribonucleotide includes a combination of at least two (e.g., 2, 3, 4 or more) of any of the aforementioned modified nucleobases, including but not limited to chemical modifications.

[0153] In some embodiments, a RNA nucleic acid of the disclosure comprises N1-methyl-pseudouridine (m1ψ) substitutions at one or more or all uridine positions of the nucleic acid.

[0154] In some embodiments, a RNA nucleic acid of the disclosure comprises N1-methyl-pseudouridine (m1ψ) substitutions at one or more or all uridine positions of the nucleic acid and 5-methyl cytidine substitutions at one or more or all cytidine positions of the nucleic acid.

[0155] In some embodiments, a RNA nucleic acid of the disclosure comprises pseudouridine (ψ) substitutions at one or more or all uridine positions of the nucleic acid.

[0156] In some embodiments, a RNA nucleic acid of the disclosure comprises pseudouridine (ψ) substitutions at one or more or all uridine positions of the nucleic acid and 5-methyl cytidine substitutions at one or more or all cytidine positions of the nucleic acid.

[0157] In some embodiments, a RNA nucleic acid of the disclosure comprises uridine at one or more or all uridine positions of the nucleic acid.

[0158] In some embodiments, nucleic acids (e.g., RNA nucleic acids, such as mRNA nucleic acids) are uniformly modified (e.g., fully modified, modified throughout the entire sequence) for a particular modification. For example, a nucleic acid can be uniformly modified with N1-methyl-pseudouridine, meaning that all uridine residues in the mRNA sequence are replaced with N1-methyl-pseudouridine. Similarly, a nucleic acid can be uniformly modified for any type of nucleoside residue present in the sequence by replacement with a modified residue such as those set forth above.

[0159] The nucleic acids of the present disclosure may be partially or fully modified along the entire length of the molecule. For example, one or more or all or a given type of nucleotide (e.g., purine or pyrimidine, or any one or more or all of A, G, U, C) may be uniformly modified in a nucleic acid of the disclosure, or in a predetermined sequence region thereof (e.g., in the mRNA including or excluding the poly-A tail). In some embodiments, all nucleotides X in a nucleic acid of the present disclosure (or in a sequence region thereof) are modified nucleotides, wherein X may be any one of nucleotides A, G, U, C, or any one of the combinations A+G, A+U, A+C, G+U, G+C, U+C, A+G+U, A+G+C, G+U+C or A+G+C.

[0160] The nucleic acid may contain from about 1% to about 100% modified nucleotides (either in relation to overall nucleotide content, or in relation to one or more types of nucleotide, i.e., any one or more of A, G, U or C) or any intervening percentage (e.g., from 1% to 20%, from 1% to 25%, from 1% to 50%, from 1% to 60%, from 1% to 70%, from 1% to 80%, from 1% to 90%, from 1% to 95%, from 10% to 20%, from 10% to 25%, from 10% to 50%, from 10% to 60%, from 10% to 70%, from 10% to 80%, from 10% to 90%, from 10% to 95%, from 10% to 100%, from 20% to 25%, from 20% to 50%, from 20% to 60%, from 20% to 70%, from 20% to 80%, from 20% to 90%, from 20% to 95%, from 20% to 100%, from 50% to 60%, from 50% to 70%, from 50% to 80%, from 50% to 90%, from 50% to 95%, from 50% to 100%, from 70% to 80%, from 70% to 90%, from 70% to 95%, from 70% to 100%, from 80% to 90%, from 80% to 95%, from 80% to 100%, from 90% to 95%, from 90% to 100%, and from 95% to 100%). It will be understood that any remaining percentage is accounted for by the presence of unmodified A, G, U, or C.

[0161] The nucleic acids may contain at a minimum 1% and at maximum 100% modified nucleotides, or any intervening percentage, such as at least 5% modified nucleotides, at least 10% modified nucleotides, at least 25% modified nucleotides, at least 50% modified nucleotides, at least 80% modified nucleotides, or at least 90% modified nucleotides. For example, the nucleic acids may contain a modified pyrimidine such as a modified uracil or cytosine. In some embodiments, at least 5%, at least 10%, at least 25%, at least 50%, at least 80%, at least 90% or 100% of the uracil in the nucleic acid is replaced with a modified uracil (e.g., a 5-substituted uracil). The modified uracil can be replaced by a compound having a single unique structure, or can be replaced by a plurality of compounds having different structures (e.g., 2, 3, 4 or more unique structures). In some embodiments, at least 5%, at least 10%, at least 25%, at least 50%, at least 80%, at least 90% or 100% of the cytosine in the nucleic acid is replaced with a modified cytosine (e.g., a 5-substituted cytosine). The modified cytosine can be replaced by a compound having a single unique structure, or can be replaced by a plurality of compounds having different structures (e.g., 2, 3, 4 or more unique structures).

### Untranslated Regions (UTRs)

[0162] Translation of a polynucleotide comprising an open reading frame encoding a polypeptide can be controlled and regulated by a variety of mechanisms that are provided by various cis-acting nucleic acid structures. For example, naturally-occurring, cis-acting RNA elements that form hairpins or other higher-order (e.g., pseudoknot) intramolecular mRNA secondary structures can provide a translational regulatory activity to a polynucleotide, wherein the RNA element influences or modulates the initiation of polynucleotide translation, particularly when the RNA element is positioned in the 5′ UTR close to the 5′-cap structure (Pelletier and Sonenberg (1985) Cell 40(3):515-526; Kozak (1986) Proc Natl Acad Sci 83:2850-2854).

[0163] Untranslated regions (UTRs) are nucleic acid sections of a polynucleotide before a start codon (5′ UTR) and after a stop codon (3′ UTR) that are not translated. In some embodiments, a polynucleotide (e.g., a ribonucleic acid (RNA), e.g., a messenger RNA (mRNA)) of the invention comprising an open reading frame (ORF) encoding an ABCB4, ABCB11, or ATP8B1 polypeptide further comprises UTR (e.g., a 5′ UTR or functional fragment thereof, a 3′ UTR or functional fragment thereof, or a combination thereof).

[0164] Cis-acting RNA elements can also affect translation elongation, being involved in numerous frameshifting events (Namy et al., (2004) Mol Cell 13(2):157-168). Internal ribosome entry sequences (IRES) represent another type of cis-acting RNA element that are typically located in 5′ UTRs, but have also been reported to be found within the coding region of naturally-occurring mRNAs (Holcik et al. (2000) Trends Genet 16(10):469-473). In cellular mRNAs, IRES often coexist with the 5′-cap structure and provide mRNAs with the functional capacity to be translated under conditions in which cap-dependent translation is compromised (Gebauer et al., (2012) Cold Spring Harb Perspect Biol 4(7):a012245). Another type of naturally-occurring cis-acting RNA element comprises upstream open reading frames (uORFs). Naturally-occurring uORFs occur singularly or multiply within the 5′ UTRs of numerous mRNAs and influence the translation of the downstream major ORF, usually negatively (with the notable exception of GCN4 mRNA in yeast and ATF4 mRNA in mammals, where uORFs serve to promote the translation of the downstream major ORF under conditions of increased eIF2 phosphorylation (Hinnebusch (2005) Annu Rev Microbiol 59:407-450)). Additional exemplary translational regulatory activities provided by components, structures, elements, motifs, and/or specific sequences comprising polynucleotides (e.g., mRNA) include, but are not limited to, mRNA stabilization or destabilization (Baker & Parker (2004) Curr Opin Cell Biol 16(3):293-299), translational activation (Villalba et al., (2011) Curr Opin Genet Dev 21(4):452-457), and translational repression (Blumer et al., (2002) Mech Dev 110(1-2):97-112). Studies have shown that naturally-occurring, cis-acting RNA elements can confer their respective functions when used to modify, by incorporation into, heterologous polynucleotides (Goldberg-Cohen et al., (2002) J Biol Chem 277(16):13635-13640).

### Modified Polynucleotides Comprising Functional RNA Elements

[0165] The present disclosure provides synthetic polynucleotides comprising a modification (e.g., an RNA element), wherein the modification provides a desired translational regulatory activity. In some embodiments, the disclosure provides a polynucleotide comprising a 5′ untranslated region (UTR), an initiation codon, a full open reading frame encoding a polypeptide, a 3′ UTR, and at least one modification, wherein the at least one modification provides a desired translational regulatory activity, for example, a modification that promotes and/or enhances the translational fidelity of mRNA translation. In some embodiments, the desired translational regulatory activity is a cis-acting regulatory activity. In some embodiments, the desired translational regulatory activity is an increase in the residence time of the 43S pre-initiation complex (PIC) or ribosome at, or proximal to, the initiation codon. In some embodiments, the desired translational regulatory activity is an increase in the initiation of polypeptide synthesis at or from the initiation codon. In some embodiments, the desired translational regulatory activity is an increase in the amount of polypeptide translated from the full open reading frame. In some embodiments, the desired translational regulatory activity is an increase in the fidelity of initiation codon decoding by the PIC or ribosome. In some embodiments, the desired translational regulatory activity is inhibition or reduction of leaky scanning by the PIC or ribosome. In some embodiments, the desired translational regulatory activity is a decrease in the rate of decoding the initiation codon by the PIC or ribosome. In some embodiments, the desired translational regulatory activity is inhibition or reduction in the initiation of polypeptide synthesis at any codon within the mRNA other than the initiation codon. In some embodiments, the desired translational regulatory activity is inhibition or reduction of the amount of polypeptide translated from any open reading frame within the mRNA other than the full open reading frame. In some embodiments, the desired translational regulatory activity is inhibition or reduction in the production of aberrant translation products. In some embodiments, the desired translational regulatory activity is a combination of one or more of the foregoing translational regulatory activities.

[0166] Accordingly, the present disclosure provides a polynucleotide, e.g., an mRNA, comprising an RNA element that comprises a sequence and/or an RNA secondary structure(s) that provides a desired translational regulatory activity as described herein. In some aspects, the mRNA comprises an RNA element that comprises a sequence and/or an RNA secondary structure(s) that promotes and/or enhances the translational fidelity of mRNA translation. In some aspects, the mRNA comprises an RNA element that comprises a sequence and/or an RNA secondary structure(s) that provides a desired translational regulatory activity, such as inhibiting and/or reducing leaky scanning. In some aspects, the disclosure provides an mRNA that comprises an RNA element that comprises a sequence and/or an RNA secondary structure(s) that inhibits and/or reduces leaky scanning thereby promoting the translational fidelity of the mRNA.

[0167] In some embodiments, the RNA element comprises natural and/or modified nucleotides. In some embodiments, the RNA element comprises of a sequence of linked nucleotides, or derivatives or analogs thereof, that provides a desired translational regulatory activity as described herein. In some embodiments, the RNA element comprises a sequence of linked nucleotides, or derivatives or analogs thereof, that forms or folds into a stable RNA secondary structure, wherein the RNA secondary structure provides a desired translational regulatory activity as described herein. RNA elements can be identified and/or characterized based on the primary sequence of the element (e.g., GC-rich element), by RNA secondary structure formed by the element (e.g. stem-loop), by the location of the element within the RNA molecule (e.g., located within the 5′ UTR of an mRNA), by the biological function and/or activity of the element (e.g., “translational enhancer element”), and any combination thereof.

[0168] In some aspects, the disclosure provides an mRNA having one or more structural modifications that inhibits leaky scanning and/or promotes the translational fidelity of mRNA translation, wherein at least one of the structural modifications is a GC-rich RNA element. In some aspects, the disclosure provides a modified mRNA comprising at least one modification, wherein at least one modification is a GC-rich RNA element comprising a sequence of linked nucleotides, or derivatives or analogs thereof, preceding a Kozak consensus sequence in a 5′ UTR of the mRNA. In one embodiment, the GC-rich RNA element is located about 30, about 25, about 20, about 15, about 10, about 5, about 4, about 3, about 2, or about 1 nucleotide(s) upstream of a Kozak consensus sequence in the 5′ UTR of the mRNA. In another embodiment, the GC-rich RNA element is located 15-30, 15-20, 15-25, 10-15, or 5-10 nucleotides upstream of a Kozak consensus sequence. In another embodiment, the GC-rich RNA element is located immediately adjacent to a Kozak consensus sequence in the 5′ UTR of the mRNA.

[0169] In any of the foregoing or related aspects, the disclosure provides a GC-rich RNA element which comprises a sequence of 3-30, 5-25, 10-20, 15-20, about 20, about 15, about 12, about 10, about 7, about 6 or about 3 nucleotides, derivatives or analogs thereof, linked in any order, wherein the sequence composition is 70-80% cytosine, 60-70% cytosine, 50%-60% cytosine, 40-50% cytosine, 30-40% cytosine bases. In any of the foregoing or related aspects, the disclosure provides a GC-rich RNA element which comprises a sequence of 3-30, 5-25, 10-20, 15-20, about 20, about 15, about 12, about 10, about 7, about 6 or about 3 nucleotides, derivatives or analogs thereof, linked in any order, wherein the sequence composition is about 80% cytosine, about 70% cytosine, about 60% cytosine, about 50% cytosine, about 40% cytosine, or about 30% cytosine.

[0170] In any of the foregoing or related aspects, the disclosure provides a GC-rich RNA element which comprises a sequence of 20, 19, 18, 17, 16, 15, 14, 13, 12, 11, 10, 9, 8, 7, 6, 5, 4, or 3 nucleotides, or derivatives or analogs thereof, linked in any order, wherein the sequence composition is 70-80% cytosine, 60-70% cytosine, 50%-60% cytosine, 40-50% cytosine, or 30-40% cytosine. In any of the foregoing or related aspects, the disclosure provides a GC-rich RNA element which comprises a sequence of 20, 19, 18, 17, 16, 15, 14, 13, 12, 11, 10, 9, 8, 7, 6, 5, 4, or 3 nucleotides, or derivatives or analogs thereof, linked in any order, wherein the sequence composition is about 80% cytosine, about 70% cytosine, about 60% cytosine, about 50% cytosine, about 40% cytosine, or about 30% cytosine.

[0171] In some embodiments, the disclosure provides a modified mRNA comprising at least one modification, wherein at least one modification is a GC-rich RNA element comprising a sequence of linked nucleotides, or derivatives or analogs thereof, preceding a Kozak consensus sequence in a 5′ UTR of the mRNA, wherein the GC-rich RNA element is located about 30, about 25, about 20, about 15, about 10, about 5, about 4, about 3, about 2, or about 1 nucleotide(s) upstream of a Kozak consensus sequence in the 5′ UTR of the mRNA, and wherein the GC-rich RNA element comprises a sequence of 3, 4, 5, 6, 7, 8, 9, 10, 11, 12, 13, 14, 15, 16, 17, 18, 19, or 20 nucleotides, or derivatives or analogs thereof, linked in any order, wherein the sequence composition is >50% cytosine. In some embodiments, the sequence composition is >55% cytosine, >60% cytosine, >65% cytosine, >70% cytosine, >75% cytosine, >80% cytosine, >85% cytosine, or >90% cytosine.

[0172] In other aspects, the disclosure provides a modified mRNA comprising at least one modification, wherein at least one modification is a GC-rich RNA element comprising a sequence of linked nucleotides, or derivatives or analogs thereof, preceding a Kozak consensus sequence in a 5′ UTR of the mRNA, wherein the GC-rich RNA element is located about 30, about 25, about 20, about 15, about 10, about 5, about 4, about 3, about 2, or about 1 nucleotide(s) upstream of a Kozak consensus sequence in the 5′ UTR of the mRNA, and wherein the GC-rich RNA element comprises a sequence of about 3-30, 5-25, 10-20, 15-20 or about 20, about 15, about 12, about 10, about 6 or about 3 nucleotides, or derivatives or analogues thereof, wherein the sequence comprises a repeating GC-motif, wherein the repeating GC-motif is [CCG]n, wherein n=1 to 10, n=2 to 8, n=3 to 6, or n=4 to 5. In some embodiments, the sequence comprises a repeating GC-motif [CCG]n, wherein n=1, 2, 3, 4 or 5. In some embodiments, the sequence comprises a repeating GC-motif [CCG]n, wherein n=1, 2, or 3. In some embodiments, the sequence comprises a repeating GC-motif [CCG]n, wherein n=1. In some embodiments, the sequence comprises a repeating GC-motif [CCG]n, wherein n=2. In some embodiments, the sequence comprises a repeating GC-motif [CCG]n, wherein n=3. In some embodiments, the sequence comprises a repeating GC-motif [CCG]n, wherein n=4. In some embodiments, the sequence comprises a repeating GC-motif [CCG]n, wherein n=5.

[0173] In another aspect, the disclosure provides a modified mRNA comprising at least one modification, wherein at least one modification is a GC-rich RNA element comprising a sequence of linked nucleotides, or derivatives or analogs thereof, preceding a Kozak consensus sequence in a 5′ UTR of the mRNA, wherein the GC-rich RNA element comprises any one of the sequences set forth in Table 2. In one embodiment, the GC-rich RNA element is located about 30, about 25, about 20, about 15, about 10, about 5, about 4, about 3, about 2, or about 1 nucleotide(s) upstream of a Kozak consensus sequence in the 5′ UTR of the mRNA. In another embodiment, the GC-rich RNA element is located about 15-30, 15-20, 15-25, 10-15, or 5-10 nucleotides upstream of a Kozak consensus sequence. In another embodiment, the GC-rich RNA element is located immediately adjacent to a Kozak consensus sequence in the 5′ UTR of the mRNA.

[0174] In other aspects, the disclosure provides a modified mRNA comprising at least one modification, wherein at least one modification is a GC-rich RNA element comprising the sequence V1 [CCCCGGCGCC (SEQ ID NO: 291)] as set forth in Table 2, or derivatives or analogs thereof, preceding a Kozak consensus sequence in the 5′ UTR of the mRNA. In some embodiments, the GC-rich element comprises the sequence V1 as set forth in Table 2 located immediately adjacent to and upstream of the Kozak consensus sequence in the 5′ UTR of the mRNA. In some embodiments, the GC-rich element comprises the sequence V1 as set forth in Table 2 located 1, 2, 3, 4, 5, 6, 7, 8, 9 or 10 bases upstream of the Kozak consensus sequence in the 5′ UTR of the mRNA. In other embodiments, the GC-rich element comprises the sequence V1 as set forth in Table 2 located 1-3, 3-5, 5-7, 7-9, 9-12, or 12-15 bases upstream of the Kozak consensus sequence in the 5′ UTR of the mRNA.

[0175] In other aspects, the disclosure provides a modified mRNA comprising at least one modification, wherein at least one modification is a GC-rich RNA element comprising the sequence V2 [CCCCGGC (SEQ ID NO:292)] as set forth in Table 2, or derivatives or analogs thereof, preceding a Kozak consensus sequence in the 5′ UTR of the mRNA. In some embodiments, the GC-rich element comprises the sequence V2 as set forth in Table 2 located immediately adjacent to and upstream of the Kozak consensus sequence in the 5′ UTR of the mRNA. In some embodiments, the GC-rich element comprises the sequence V2 as set forth in Table 2 located 1, 2, 3, 4, 5, 6, 7, 8, 9 or 10 bases upstream of the Kozak consensus sequence in the 5′ UTR of the mRNA. In other embodiments, the GC-rich element comprises the sequence V2 as set forth in Table 2 located 1-3, 3-5, 5-7, 7-9, 9-12, or 12-15 bases upstream of the Kozak consensus sequence in the 5′ UTR of the mRNA.

[0176] In other aspects, the disclosure provides a modified mRNA comprising at least one modification, wherein at least one modification is a GC-rich RNA element comprising the sequence EK [GCCGCC (SEQ ID NO: 290)] as set forth in Table 2, or derivatives or analogs thereof, preceding a Kozak consensus sequence in the 5′ UTR of the mRNA. In some embodiments, the GC-rich element comprises the sequence EK as set forth in Table 2 located immediately adjacent to and upstream of the Kozak consensus sequence in the 5′ UTR of the mRNA. In some embodiments, the GC-rich element comprises the sequence EK as set forth in Table 2 located 1, 2, 3, 4, 5, 6, 7, 8, 9 or 10 bases upstream of the Kozak consensus sequence in the 5′ UTR of the mRNA. In other embodiments, the GC-rich element comprises the sequence EK as set forth in Table 2 located 1-3, 3-5, 5-7, 7-9, 9-12, or 12-15 bases upstream of the Kozak consensus sequence in the 5′ UTR of the mRNA.

[0177] In yet other aspects, the disclosure provides a modified mRNA comprising at least one modification, wherein at least one modification is a GC-rich RNA element comprising the sequence V1 [CCCCGGCGCC (SEQ ID NO: 291)] as set forth in Table 2, or derivatives or analogs thereof, preceding a Kozak consensus sequence in the 5′ UTR of the mRNA, wherein the 5′ UTR comprises the following sequence shown in Table 2: GGGAAAUAAGAGAGAAAAGAAGAGUAAGAAGAAAUAUAAGAGCCACC (SEQ ID NO: 12). The skilled artisan will of course recognize that all Us in the RNA sequences described herein will be Ts in a corresponding template DNA sequence, for example, in DNA templates or constructs from which mRNAs of the disclosure are transcribed, e.g., via IVT.

[0178] In some embodiments, the GC-rich element comprises the sequence V1 as set forth in Table 2 located immediately adjacent to and upstream of the Kozak consensus sequence in the 5′ UTR sequence shown in Table 2. In some embodiments, the GC-rich element comprises the sequence V1 as set forth in Table 2 located 1, 2, 3, 4, 5, 6, 7, 8, 9 or 10 bases upstream of the Kozak consensus sequence in the 5′ UTR of the mRNA, wherein the 5′ UTR comprises the following sequence shown in Table 2:

(SEQ ID NO: 12)
GGGAAAUAAGAGAGAAAAGAAGAGUAAGAAGAAAUAUAAGAGCCACC.

[0179] In other embodiments, the GC-rich element comprises the sequence V1 as set forth in Table 2 located 1-3, 3-5, 5-7, 7-9, 9-12, or 12-15 bases upstream of the Kozak consensus sequence in the 5′ UTR of the mRNA, wherein the 5′ UTR comprises the following sequence shown in Table 2:

(SEQ ID NO: 12)
GGGAAAUAAGAGAGAAAAGAAGAGUAAGAAGAAAUAUAAGAGCCACC.

[0180] In some embodiments, the 5′ UTR comprises the following sequence set forth in Table 2:

(SEQ ID NO: 287)
GGGAAAUAAGAGAGAAAAGAAGAGUAAGAAGAAAUAUAAGACCCCGGCGC
CGCCACC.

TABLE 2

| 5′ UTRs | 5′ UTR Sequence |
|---|---|
| Standard | GGGAAAUAAGAGAGAAAAGAAGAGUAAG |
| | AAGAAAUAUAAGAGCCACC (SEQ ID |
| | NO: 12) |
| V1-UTR | GGGAAAUAAGAGAGAAAAGAAGAGUAAG |
| | AAGAAAUAUAAGACCCCGGCGCCGCCAC |
| | C (SEQ ID NO: 287) |
| V2-UTR | GGGAAAUAAGAGAGAAAAGAAGAGUAAG |
| | AAGAAAUAUAAGACCCCGGCGCCACC |
| | (SEQ ID NO: 288) |
| GC-Rich RNA Elements | Sequence |
| K0 (Traditional Kozak | [GCCA/GCC] (SEQ ID NO: 289) |
| consensus) | |
| EK | [GCCGCC] (SEQ ID NO: 290) |
| V1 | [CCCCGGCGCC] (SEQ ID NO: 291) |
| V2 | [CCCCGGC] (SEQ ID NO: 292) |
| (CCG)ₙ, where n = 1-10 | [CCG]ₙ (SEQ ID NO: 294) |
| (GCC)ₙ, where n = 1-10 | [GCC]ₙ (SEQ ID NO: 295) |

[0181] In another aspect, the disclosure provides a modified mRNA comprising at least one modification, wherein at least one modification is a GC-rich RNA element comprising a stable RNA secondary structure comprising a sequence of nucleotides, or derivatives or analogs thereof, linked in an order which forms a hairpin or a stem-loop. In one embodiment, the stable RNA secondary structure is upstream of the Kozak consensus sequence. In another embodiment, the stable RNA secondary structure is located about 30, about 25, about 20, about 15, about 10, or about 5 nucleotides upstream of the Kozak consensus sequence. In another embodiment, the stable RNA secondary structure is located about 20, about 15, about 10 or about 5 nucleotides upstream of the Kozak consensus sequence. In another embodiment, the stable RNA secondary structure is located about 5, about 4, about 3, about 2, about 1 nucleotides upstream of the Kozak consensus sequence. In another embodiment, the stable RNA secondary structure is located about 15-30, about 15-20, about 15-25, about 10-15, or about 5-10 nucleotides upstream of the Kozak consensus sequence. In another embodiment, the stable RNA secondary structure is located 12-15 nucleotides upstream of the Kozak consensus sequence. In another embodiment, the stable RNA secondary structure has a deltaG of about −30 kcal/mol, about −20 to −30 kcal/mol, about −20 kcal/mol, about −10 to −20 kcal/mol, about −10 kcal/mol, about −5 to −10 kcal/mol.

[0182] In another embodiment, the modification is operably linked to an open reading frame encoding a polypeptide and wherein the modification and the open reading frame are heterologous.

[0183] In another embodiment, the sequence of the GC-rich RNA element is comprised exclusively of guanine (G) and cytosine (C) nucleobases.

[0184] RNA elements that provide a desired translational regulatory activity as described herein can be identified and characterized using known techniques, such as ribosome profiling. Ribosome profiling is a technique that allows the determination of the positions of PICs and/or ribosomes bound to mRNAs (see e.g., Ingolia et al., (2009) Science 324(5924):218-23, incorporated herein by reference). The technique is based on protecting a region or segment of mRNA, by the PIC and/or ribosome, from nuclease digestion. Protection results in the generation of a 30-bp fragment of RNA termed a ‘footprint’. The sequence and frequency of RNA footprints can be analyzed by methods known in the art (e.g., RNA-seq). The footprint is roughly centered on the A-site of the ribosome. If the PIC or ribosome dwells at a particular position or location along an mRNA, footprints generated at these position would be relatively common. Studies have shown that more footprints are generated at positions where the PIC and/or ribosome exhibits decreased processivity and fewer footprints where the PIC and/or ribosome exhibits increased processivity (Gardin et al., (2014) eLife 3:e03735). In some embodiments, residence time or the time of occupancy of the PIC or ribosome at a discrete position or location along a polynucleotide comprising any one or more of the RNA elements described herein is determined by ribosome profiling.

[0185] A UTR can be homologous or heterologous to the coding region in a polynucleotide. In some embodiments, the UTR is homologous to the ORF encoding the ABCB4, ABCB11, or ATP8B1 polypeptide. In some embodiments, the UTR is heterologous to the ORF encoding the ABCB4, ABCB11, or ATP8B1 polypeptide. In some embodiments, the polynucleotide comprises two or more 5′ UTRs or functional fragments thereof, each of which has the same or different nucleotide sequences. In some embodiments, the polynucleotide comprises two or more 3′ UTRs or functional fragments thereof, each of which has the same or different nucleotide sequences.

[0186] In some embodiments, the 5′ UTR or functional fragment thereof, 3′ UTR or functional fragment thereof, or any combination thereof is sequence optimized.

[0187] In some embodiments, the 5′UTR or functional fragment thereof, 3′ UTR or functional fragment thereof, or any combination thereof comprises at least one chemically modified nucleobase, e.g., N1-methylpseudouracil or 5-methoxyuracil.

[0188] UTRs can have features that provide a regulatory role, e.g., increased or decreased stability, localization and/or translation efficiency. A polynucleotide comprising a UTR can be administered to a cell, tissue, or organism, and one or more regulatory features can be measured using routine methods. In some embodiments, a functional fragment of a 5′ UTR or 3′ UTR comprises one or more regulatory features of a full length 5′ or 3′ UTR, respectively.

[0189] Natural 5′UTRs bear features that play roles in translation initiation. They harbor signatures like Kozak sequences that are commonly known to be involved in the process by which the ribosome initiates translation of many genes. Kozak sequences have the consensus CCR(A/G)CCAUGG (SEQ ID NO:248), where R is a purine (adenine or guanine) three bases upstream of the start codon (AUG), which is followed by another ‘G’. 5′ UTRs also have been known to form secondary structures that are involved in elongation factor binding.

[0190] By engineering the features typically found in abundantly expressed genes of specific target organs, one can enhance the stability and protein production of a polynucleotide. For example, introduction of 5′ UTR of liver-expressed mRNA, such as albumin, serum amyloid A, Apolipoprotein AB/E, transferrin, alpha fetoprotein, erythropoietin, or Factor VIII, can enhance expression of polynucleotides in hepatic cell lines or liver. Likewise, use of 5′UTR from other tissue-specific mRNA to improve expression in that tissue is possible for muscle (e.g., MyoD, Myosin, Myoglobin, Myogenin, Herculin), for endothelial cells (e.g., Tie-1, CD36), for myeloid cells (e.g., C/EBP, AML1, G-CSF, GM-CSF, CD11b, MSR, Fr-1, i-NOS), for leukocytes (e.g., CD45, CD18), for adipose tissue (e.g., CD36, GLUT4, ACRP30, adiponectin) and for lung epithelial cells (e.g., SP-A/B/C/D).

[0191] In some embodiments, UTRs are selected from a family of transcripts whose proteins share a common function, structure, feature or property. For example, an encoded polypeptide can belong to a family of proteins (i.e., that share at least one function, structure, feature, localization, origin, or expression pattern), which are expressed in a particular cell, tissue or at some time during development. The UTRs from any of the genes or mRNA can be swapped for any other UTR of the same or different family of proteins to create a new polynucleotide.

[0192] In some embodiments, the 5′ UTR and the 3′ UTR can be heterologous. In some embodiments, the 5′ UTR can be derived from a different species than the 3′ UTR. In some embodiments, the 3′ UTR can be derived from a different species than the 5′ UTR.

[0193] Co-owned International Patent Application No. PCT/US2014/021522 (Publ. No. WO/2014/164253, incorporated herein by reference in its entirety) provides a listing of exemplary UTRs that can be utilized in the polynucleotide of the present invention as flanking regions to an ORF.

[0194] Exemplary UTRs of the application include, but are not limited to, one or more 5′UTR and/or 3′UTR derived from the nucleic acid sequence of: a globin, such as an α- or β-globin (e.g., a Xenopus, mouse, rabbit, or human globin); a strong Kozak translational initiation signal; a CYBA (e.g., human cytochrome b-245 α polypeptide); an albumin (e.g., human albumin7); a HSD17B4 (hydroxysteroid (1743) dehydrogenase); a virus (e.g., a tobacco etch virus (TEV), a Venezuelan equine encephalitis virus (VEEV), a Dengue virus, a cytomegalovirus (CMV) (e.g., CMV immediate early 1 (IE1)), a hepatitis virus (e.g., hepatitis B virus), a sindbis virus, or a PAV barley yellow dwarf virus); a heat shock protein (e.g., hsp70); a translation initiation factor (e.g., elF4G); a glucose transporter (e.g., hGLUT1 (human glucose transporter 1)); an actin (e.g., human a or (3 actin); a GAPDH; a tubulin; a histone; a citric acid cycle enzyme; a topoisomerase (e.g., a 5′UTR of a TOP gene lacking the 5′ TOP motif (the oligopyrimidine tract)); a ribosomal protein Large 32 (L32); a ribosomal protein (e.g., human or mouse ribosomal protein, such as, for example, rps9); an ATP synthase (e.g., ATP5A1 or the β subunit of mitochondrial Et-ATP synthase); a growth hormone e (e.g., bovine (bGH) or human (hGH)); an elongation factor (e.g., elongation factor 1 α 1 (EEF1A1)); a manganese superoxide dismutase (MnSOD); a myocyte enhancer factor 2A (MEF2A); a β-F1-ATPase, a creatine kinase, a myoglobin, a granulocyte-colony stimulating factor (G-CSF); a collagen (e.g., collagen type I, alpha 2 (Col1A2), collagen type I, alpha 1 (Col1A1), collagen type VI, alpha 2 (Col6A2), collagen type VI, alpha 1 (Col6A1)); a ribophorin (e.g., ribophorin I (RPNI)); a low density lipoprotein receptor-related protein (e.g., LRP1); a cardiotrophin-like cytokine factor (e.g., Nnt1); calreticulin (Calr); a procollagen-lysine, 2-oxoglutarate 5-dioxygenase 1 (Plod1); and a nucleobindin (e.g., Nucb1).

[0195] In some embodiments, the 5′ UTR is selected from the group consisting of a β-globin 5′ UTR; a 5′UTR containing a strong Kozak translational initiation signal; a cytochrome b-245 α polypeptide (CYBA) 5′ UTR; a hydroxysteroid (17-β) dehydrogenase (HSD17B4) 5′ UTR; a Tobacco etch virus (TEV) 5′ UTR; a Venezuelen equine encephalitis virus (TEEV) 5′ UTR; a 5′ proximal open reading frame of rubella virus (RV) RNA encoding nonstructural proteins; a Dengue virus (DEN) 5′ UTR; a heat shock protein 70 (Hsp70) 5′ UTR; a eIF4G 5′ UTR; a GLUT1 5′ UTR; functional fragments thereof and any combination thereof.

[0196] In some embodiments, the 3′ UTR is selected from the group consisting of a β-globin 3′ UTR; a CYBA 3′ UTR; an albumin 3′ UTR; a growth hormone (GH) 3′ UTR; a VEEV 3′ UTR; a hepatitis B virus (HBV) 3′ UTR; α-globin 3′UTR; a DEN 3′ UTR; a PAV barley yellow dwarf virus (BYDV-PAV) 3′ UTR; an elongation factor 1 α1 (EEF1A1) 3′ UTR; a manganese superoxide dismutase (MnSOD) 3′ UTR; a β subunit of mitochondrial H(+)-ATP synthase (β-mRNA) 3′ UTR; a GLUT1 3′ UTR; a MEF2A 3′ UTR; a β-F1-ATPase 3′ UTR; functional fragments thereof and combinations thereof.

[0197] Wild-type UTRs derived from any gene or mRNA can be incorporated into the polynucleotides of the invention. In some embodiments, a UTR can be altered relative to a wild type or native UTR to produce a variant UTR, e.g., by changing the orientation or location of the UTR relative to the ORF; or by inclusion of additional nucleotides, deletion of nucleotides, swapping or transposition of nucleotides. In some embodiments, variants of 5′ or 3′ UTRs can be utilized, for example, mutants of wild type UTRs, or variants wherein one or more nucleotides are added to or removed from a terminus of the UTR.

[0198] Additionally, one or more synthetic UTRs can be used in combination with one or more non-synthetic UTRs. See, e.g., Mandal and Rossi, Nat. Protoc. 2013 8(3):568-82, the contents of which are incorporated herein by reference in their entirety.

[0199] UTRs or portions thereof can be placed in the same orientation as in the transcript from which they were selected or can be altered in orientation or location. Hence, a 5′ and/or 3′ UTR can be inverted, shortened, lengthened, or combined with one or more other 5′ UTRs or 3′ UTRs.

[0200] In some embodiments, the polynucleotide comprises multiple UTRs, e.g., a double, a triple or a quadruple 5′ UTR or 3′ UTR. For example, a double UTR comprises two copies of the same UTR either in series or substantially in series. For example, a double beta-globin 3′UTR can be used (see US2010/0129877, the contents of which are incorporated herein by reference in its entirety).

[0201] In certain embodiments, the polynucleotides of the invention comprise a 5′ UTR and/or a 3′ UTR selected from any of the UTRs disclosed herein. In some embodiments, the 5′ UTR comprises any one of the exemplary 5′ UTR sequences presented below:

| | | SEQ |
|---|---|---|
| | | ID |
| Name | Sequence | NO: |
| 5′UTR-001 | GGGAAAUAAGAGAGAAAAGAAGAGUAAGAAGAAAUAUAAGAGCCACC | 12 |
| 5′UTR-002 | GGGAGAUCAGAGAGAAAAGAAGAGUAAGAAGAAAUAUAAGAGCCACC | 223 |
| 5′UTR-003 | GGAAUAAAAGUCUCAACACAACAUAUACAAAACAAACGAAUCUCAAGCAAUCAAGCA | 224 |
| | UUCUACUUCUAUUGCAGCAAUUUAAAUCAUUUCUUUUAAAGCAAAAGCAAUUUUCUG | |
| | AAAAUUUUCACCAUUUACGAACGAUAGCAAC | |
| 5′UTR-004 | GGGAGACAAGCUUGGCAUUCCGGUACUGUUGGUAAAGCCACC | 225 |
| 5′UTR-005 | GGGAGAUCAGAGAGAAAAGAAGAGUAAGAAGAAAUAUAAGAGCCACC | 226 |
| 5′UTR-006 | GGAAUAAAAGUCUCAACACAACAUAUACAAAACAAACGAAUCUCAAGCAAUCAAGCA | 227 |
| | UUCUACUUCUAUUGCAGCAAUUUAAAUCAUUUCUUUUAAAGCAAAAGCAAUUUUCUG | |
| | AAAAUUUUCACCAUUUACGAACGAUAGCAAC | |
| 5′UTR-007 | GGGAGACAAGCUUGGCAUUCCGGUACUGUUGGUAAAGCCACC | 228 |
| 5′UTR-008 | GGGAAUUAACAGAGAAAAGAAGAGUAAGAAGAAAUAUAAGAGCCACC | 229 |
| 5′UTR-009 | GGGAAAUUAGACAGAAAAGAAGAGUAAGAAGAAAUAUAAGAGCCACC | 230 |
| 5′UTR-010 | GGGAAAUAAGAGAGUAAAGAACAGUAAGAAGAAAUAUAAGAGCCACC | 231 |
| 5′UTR-011 | GGGAAAAAAGAGAGAAAAGAAGACUAAGAAGAAAUAUAAGAGCCACC | 232 |
| 5′UTR-012 | GGGAAAUAAGAGAGAAAAGAAGAGUAAGAAGAUAUAUAAGAGCCACC | 233 |
| 5′UTR-013 | GGGAAAUAAGAGACAAAACAAGAGUAAGAAGAAAUAUAAGAGCCACC | 234 |
| 5′UTR-014 | GGGAAAUUAGAGAGUAAAGAACAGUAAGUAGAAUUAAAAGAGCCACC | 235 |
| 5′UTR-015 | GGGAAAUAAGAGAGAAUAGAAGAGUAAGAAGAAAUAUAAGAGCCACC | 236 |
| 5′UTR-016 | GGGAAAUAAGAGAGAAAAGAAGAGUAAGAAGAAAAUUAAGAGCCACC | 237 |
| 5′UTR-017 | GGGAAAUAAGAGAGAAAAGAAGAGUAAGAAGAAAUUUAAGAGCCACC | 238 |
| 5′UTR-018 | UCAAGCUUUUGGACCCUCGUACAGAAGCUAAUACGACUCACUAUAGGGAAAUAAGAG | 239 |
| | AGAAAAGAAGAGUAAGAAGAAAUAUAAGAGCCACC | |
| 142-3p | UGAUAAUAGUCCAUAAAGUAGGAAACACUACAGCUGGAGCCUCGGUGGCCAUGCUUC | 183 |
| 5′UTR-001 | UUGCCCCUUGGGCCUCCCCCCAGCCCCUCCUCCCCUUCCUGCACCCGUACCCCCGUG | |
| | GUCUUUGAAUAAAGUCUGAGUGGGCGGC | |
| 142-3p | UGAUAAUAGGCUGGAGCCUCGGUGGCUCCAUAAAGUAGGAAACACUACACAUGCUUC | 184 |
| 5′UTR-002 | UUGCCCCUUGGGCCUCCCCCCAGCCCCUCCUCCCCUUCCUGCACCCGUACCCCCGUG | |
| | GUCUUUGAAUAAAGUCUGAGUGGGCGGC | |
| 142-3p | UGAUAAUAGGCUGGAGCCUCGGUGGCCAUGCUUCUUGCCCCUUCCAUAAAGUAGGAA | 191 |
| 5′UTR-003 | ACACUACAUGGGCCUCCCCCCAGCCCCUCCUCCCCUUCCUGCACCCGUACCCCCGUG | |
| | GUCUUUGAAUAAAGUCUGAGUGGGCGGC | |
| 142-3p | UGAUAAUAGGCUGGAGCCUCGGUGGCCAUGCUUCUUGCCCCUUGGGCCUCCCCCCAG | 192 |
| 5′UTR-004 | UCCAUAAAGUAGGAAACACUACACCCCUCCUCCCCUUCCUGCACCCGUACCCCCGUG | |
| | GUCUUUGAAUAAAGUCUGAGUGGGCGGC | |
| 142-3p | UGAUAAUAGGCUGGAGCCUCGGUGGCCAUGCUUCUUGCCCCUUGGGCCUCCCCCCAG | 193 |
| 5′UTR-005 | CCCCUCCUCCCCUUCUCCAUAAAGUAGGAAACACUACACUGCACCCGUACCCCCGUG | |
| | GUCUUUGAAUAAAGUCUGAGUGGGCGGC | |
| 142-3p | UGAUAAUAGGCUGGAGCCUCGGUGGCCAUGCUUCUUGCCCCUUGGGCCUCCCCCCAG | 172 |
| 5′UTR-006 | CCCCUCCUCCCCUUCCUGCACCCGUACCCCCUCCAUAAAGUAGGAAACACUACAGUG | |
| | GUCUUUGAAUAAAGUCUGAGUGGGCGGC | |
| 142-3p | UGAUAAUAGGCUGGAGCCUCGGUGGCCAUGCUUCUUGCCCCUUGGGCCUCCCCCCAG | 194 |
| 5′UTR-007 | CCCCUCCUCCCCUUCCUGCACCCGUACCCCCGUGGUCUUUGAAUAAAGUUCCAUAAA | |
| | GUAGGAAACACUACACUGAGUGGGCGGC | |

In some embodiments, the 3′ UTR comprises any one of the exemplary 3′ UTR sequences presented below:

| | | SEQ |
|---|---|---|
| | | ID |
| Name | Sequence | NO: |
| 3′UTR-001 | GCGCCUGCCCACCUGCCACCGACUGCUGGAACCCAGCCAGUGGGAGGGCCUGGCCCA | 206 |
| | CCAGAGUCCUGCUCCCUCACUCCUCGCCCCGCCCCCUGUCCCAGAGUCCCACCUGGG | |
| | GGCUCUCUCCACCCUUCUCAGAGUUCCAGUUUCAACCAGAGUUCCAACCAAUGGGCU | |
| | CCAUCCUCUGGAUUCUGGCCAAUGAAAUAUCUCCCUGGCAGGGUCCUCUUCUUUUCC | |
| | CAGAGCUCCACCCCAACCAGGAGCUCUAGUUAAUGGAGAGCUCCCAGCACACUCGGA | |
| | GCUUGUGCUUUGUCUCCACGCAAAGCGAUAAAUAAAAGCAUUGGUGGCCUUUGGUCU | |
| | UUGAAUAAAGCCUGAGUAGGAAGUCUAGA | |
| 3′UTR-002 | GCCCCUGCCGCUCCCACCCCCACCCAUCUGGGCCCCGGGUUCAAGAGAGAGCGGGGU | 207 |
| | CUGAUCUCGUGUAGCCAUAUAGAGUUUGCUUCUGAGUGUCUGCUUUGUUUAGUAGAG | |
| | GUGGGCAGGAGGAGCUGAGGGGCUGGGGCUGGGGUGUUGAAGUUGGCUUUGCAUGCC | |
| | CAGCGAUGCGCCUCCCUGUGGGAUGUCAUCACCCUGGGAACCGGGAGUGGCCCUUGG | |
| | CUCACUGUGUUCUGCAUGGUUUGGAUCUGAAUUAAUUGUCCUUUCUUCUAAAUCCCA | |
| | ACCGAACUUCUUCCAACCUCCAAACUGGCUGUAACCCCAAAUCCAAGCCAUUAACUA | |
| | CACCUGACAGUAGCAAUUGUCUGAUUAAUCACUGGCCCCUUGAAGACAGCAGAAUGU | |
| | CCCUUUGCAAUGAGGAGGAGAUCUGGGCUGGGCGGGCCAGCUGGGGAAGCAUUUGAC | |
| | UAUCUGGAACUUGUGUGUGCCUCCUCAGGUAUGGCAGUGACUCACCUGGUUUUAAUA | |
| | AAACAACCUGCAACAUCUCAUGGUCUUUGAAUAAAGCCUGAGUAGGAAGUCUAGA | |
| 3′UTR-003 | ACACACUCCACCUCCAGCACGCGACUUCUCAGGACGACGAAUCUUCUCAAUGGGGGG | 208 |
| | GCGGCUGAGCUCCAGCCACCCCGCAGUCACUUUCUUUGUAACAACUUCCGUUGCUGC | |
| | CAUCGUAAACUGACACAGUGUUUAUAACGUGUACAUACAUUAACUUAUUACCUCAUU | |
| | UUGUUAUUUUUCGAAACAAAGCCCUGUGGAAGAAAAUGGAAAACUUGAAGAAGCAUU | |
| | AAAGUCAUUCUGUUAAGCUGCGUAAAUGGUCUUUGAAUAAAGCCUGAGUAGGAAGUC | |
| | UAGA | |
| 3′UTR-004 | CAUCACAUUUAAAAGCAUCUCAGCCUACCAUGAGAAUAAGAGAAAGAAAAUGAAGAU | 209 |
| | CAAAAGCUUAUUCAUCUGUUUUUCUUUUUCGUUGGUGUAAAGCCAACACCCUGUCUA | |
| | AAAAACAUAAAUUUCUUUAAUCAUUUUGCCUCUUUUCUCUGUGCUUCAAUUAAUAAA | |
| | AAAUGGAAAGAAUCUAAUAGAGUGGUACAGCACUGUUAUUUUUCAAAGAUGUGUUGC | |
| | UAUCCUGAAAAUUCUGUAGGUUCUGUGGAAGUUCCAGUGUUCUCUCUUAUUCCACUU | |
| | CGGUAGAGGAUUUCUAGUUUCUUGUGGGCUAAUUAAAUAAAUCAUUAAUACUCUUCU | |
| | AAUGGUCUUUGAAUAAAGCCUGAGUAGGAAGUCUAGA | |
| 3′UTR-005 | GCUGCCUUCUGCGGGGCUUGCCUUCUGGCCAUGCCCUUCUUCUCUCCCUUGCACCUG | 210 |
| | UACCUCUUGGUCUUUGAAUAAAGCCUGAGUAGGAAGGCGGCCGCUCGAGCAUGCAUC | |
| | UAGA | |
| 3′UTR-006 | GCCAAGCCCUCCCCAUCCCAUGUAUUUAUCUCUAUUUAAUAUUUAUGUCUAUUUAAG | 211 |
| | CCUCAUAUUUAAAGACAGGGAAGAGCAGAACGGAGCCCCAGGCCUCUGUGUCCUUCC | |
| | CUGCAUUUCUGAGUUUCAUUCUCCUGCCUGUAGCAGUGAGAAAAAGCUCCUGUCCUC | |
| | CCAUCCCCUGGACUGGGAGGUAGAUAGGUAAAUACCAAGUAUUUAUUACUAUGACUG | |
| | CUCCCCAGCCCUGGCUCUGCAAUGGGCACUGGGAUGAGCCGCUGUGAGCCCCUGGUC | |
| | CUGAGGGUCCCCACCUGGGACCCUUGAGAGUAUCAGGUCUCCCACGUGGGAGACAAG | |
| | AAAUCCCUGUUUAAUAUUUAAACAGCAGUGUUCCCCAUCUGGGUCCUUGCACCCCUC | |
| | ACUCUGGCCUCAGCCGACUGCACAGCGGCCCCUGCAUCCCCUUGGCUGUGAGGCCCC | |
| | UGGACAAGCAGAGGUGGCCAGAGCUGGGAGGCAUGGCCCUGGGGUCCCACGAAUUUG | |
| | CUGGGGAAUCUCGUUUUUCUUCUUAAGACUUUUGGGACAUGGUUUGACUCCCGAACA | |
| | UCACCGACGCGUCUCCUGUUUUUCUGGGUGGCCUCGGGACACCUGCCCUGCCCCCAC | |
| | GAGGGUCAGGACUGUGACUCUUUUUAGGGCCAGGCAGGUGCCUGGACAUUUGCCUUG | |
| | CUGGACGGGGACUGGGGAUGUGGGAGGGAGCAGACAGGAGGAAUCAUGUCAGGCCUG | |
| | UGUGUGAAAGGAAGCUCCACUGUCACCCUCCACCUCUUCACCCCCCACUCACCAGUG | |
| | UCCCCUCCACUGUCACAUUGUAACUGAACUUCAGGAUAAUAAAGUGUUUGCCUCCAU | |
| | GGUCUUUGAAUAAAGCCUGAGUAGGAAGGCGGCCGCUCGAGCAUGCAUCUAGA | |
| 3′UTR-007 | ACUCAAUCUAAAUUAAAAAAGAAAGAAAUUUGAAAAAACUUUCUCUUUGCCAUUUCU | 212 |
| | UCUUCUUCUUUUUUAACUGAAAGCUGAAUCCUUCCAUUUCUUCUGCACAUCUACUUG | |
| | CUUAAAUUGUGGGCAAAAGAGAAAAAGAAGGAUUGAUCAGAGCAUUGUGCAAUACAG | |
| | UUUCAUUAACUCCUUCCCCCGCUCCCCCAAAAAUUUGAAUUUUUUUUUCAACACUCU | |
| | UACACCUGUUAUGGAAAAUGUCAACCUUUGUAAGAAAACCAAAAUAAAAAUUGAAAA | |
| | AUAAAAACCAUAAACAUUUGCACCACUUGUGGCUUUUGAAUAUCUUCCACAGAGGGA | |
| | AGUUUAAAACCCAAACUUCCAAAGGUUUAAACUACCUCAAAACACUUUCCCAUGAGU | |
| | GUGAUCCACAUUGUUAGGUGCUGACCUAGACAGAGAUGAACUGAGGUCCUUGUUUUG | |
| | UUUUGUUCAUAAUACAAAGGUGCUAAUUAAUAGUAUUUCAGAUACUUGAAGAAUGUU | |
| | GAUGGUGCUAGAAGAAUUUGAGAAGAAAUACUCCUGUAUUGAGUUGUAUCGUGUGGU | |
| | GUAUUUUUUAAAAAAUUUGAUUUAGCAUUCAUAUUUUCCAUCUUAUUCCCAAUUAAA | |
| | AGUAUGCAGAUUAUUUGCCCAAAUCUUCUUCAGAUUCAGCAUUUGUUCUUUGCCAGU | |
| | CUCAUUUUCAUCUUCUUCCAUGGUUCCACAGAAGCUUUGUUUCUUGGGCAAGCAGAA | |
| | AAAUUAAAUUGUACCUAUUUUGUAUAUGUGAGAUGUUUAAAUAAAUUGUGAAAAAAA | |
| | UGAAAUAAAGCAUGUUUGGUUUUCCAAAAGAACAUAU | |
| 3′UTR-008 | CGCCGCCGCCCGGGCCCCGCAGUCGAGGGUCGUGAGCCCACCCCGUCCAUGGUGCUA | 213 |
| | AGCGGGCCCGGGUCCCACACGGCCAGCACCGCUGCUCACUCGGACGACGCCCUGGGC | |
| | CUGCACCUCUCCAGCUCCUCCCACGGGGUCCCCGUAGCCCCGGCCCCCGCCCAGCCC | |
| | CAGGUCUCCCCAGGCCCUCCGCAGGCUGCCCGGCCUCCCUCCCCCUGCAGCCAUCCC | |
| | AAGGCUCCUGACCUACCUGGCCCCUGAGCUCUGGAGCAAGCCCUGACCCAAUAAAGG | |
| | CUUUGAACCCAU | |
| 3′UTR-009 | GGGGCUAGAGCCCUCUCCGCACAGCGUGGAGACGGGGCAAGGAGGGGGGUUAUUAGG | 214 |
| | AUUGGUGGUUUUGUUUUGCUUUGUUUAAAGCCGUGGGAAAAUGGCACAACUUUACCU | |
| | CUGUGGGAGAUGCAACACUGAGAGCCAAGGGGUGGGAGUUGGGAUAAUUUUUAUAUA | |
| | AAAGAAGUUUUUCCACUUUGAAUUGCUAAAAGUGGCAUUUUUCCUAUGUGCAGUCAC | |
| | UCCUCUCAUUUCUAAAAUAGGGACGUGGCCAGGCACGGUGGCUCAUGCCUGUAAUCC | |
| | CAGCACUUUGGGAGGCCGAGGCAGGCGGCUCACGAGGUCAGGAGAUCGAGACUAUCC | |
| | UGGCUAACACGGUAAAACCCUGUCUCUACUAAAAGUACAAAAAAUUAGCUGGGCGUG | |
| | GUGGUGGGCACCUGUAGUCCCAGCUACUCGGGAGGCUGAGGCAGGAGAAAGGCAUGA | |
| | AUCCAAGAGGCAGAGCUUGCAGUGAGCUGAGAUCACGCCAUUGCACUCCAGCCUGGG | |
| | CAACAGUGUUAAGACUCUGUCUCAAAUAUAAAUAAAUAAAUAAAUAAAUAAAUAAAU | |
| | AAAUAAAAAUAAAGCGAGAUGUUGCCCUCAAA | |
| 3′UTR-010 | GGCCCUGCCCCGUCGGACUGCCCCCAGAAAGCCUCCUGCCCCCUGCCAGUGAAGUCC | 215 |
| | UUCAGUGAGCCCCUCCCCAGCCAGCCCUUCCCUGGCCCCGCCGGAUGUAUAAAUGUA | |
| | AAAAUGAAGGAAUUACAUUUUAUAUGUGAGCGAGCAAGCCGGCAAGCGAGCACAGUA | |
| | UUAUUUCUCCAUCCCCUCCCUGCCUGCUCCUUGGCACCCCCAUGCUGCCUUCAGGGA | |
| | GACAGGCAGGGAGGGCUUGGGGCUGCACCUCCUACCCUCCCACCAGAACGCACCCCA | |
| | CUGGGAGAGCUGGUGGUGCAGCCUUCCCCUCCCUGUAUAAGACACUUUGCCAAGGCU | |
| | CUCCCCUCUCGCCCCAUCCCUGCUUGCCCGCUCCCACAGCUUCCUGAGGGCUAAUUC | |
| | UGGGAAGGGAGAGUUCUUUGCUGCCCCUGUCUGGAAGACGUGGCUCUGGGUGAGGUA | |
| | GGCGGGAAAGGAUGGAGUGUUUUAGUUCUUGGGGGAGGCCACCCCAAACCCCAGCCC | |
| | CAACUCCAGGGGCACCUAUGAGAUGGCCAUGCUCAACCCCCCUCCCAGACAGGCCCU | |
| | CCCUGUCUCCAGGGCCCCCACCGAGGUUCCCAGGGCUGGAGACUUCCUCUGGUAAAC | |
| | AUUCCUCCAGCCUCCCCUCCCCUGGGGACGCCAAGGAGGUGGGCCACACCCAGGAAG | |
| | GGAAAGCGGGCAGCCCCGUUUUGGGGACGUGAACGUUUUAAUAAUUUUUGCUGAAUU | |
| | CCUUUACAACUAAAUAACACAGAUAUUGUUAUAAAUAAAAUUGU | |
| 3′UTR-011 | AUAUUAAGGAUCAAGCUGUUAGCUAAUAAUGCCACCUCUGCAGUUUUGGGAACAGGC | 216 |
| | AAAUAAAGUAUCAGUAUACAUGGUGAUGUACAUCUGUAGCAAAGCUCUUGGAGAAAA | |
| | UGAAGACUGAAGAAAGCAAAGCAAAAACUGUAUAGAGAGAUUUUUCAAAAGCAGUAA | |
| | UCCCUCAAUUUUAAAAAAGGAUUGAAAAUUCUAAAUGUCUUUCUGUGCAUAUUUUUU | |
| | GUGUUAGGAAUCAAAAGUAUUUUAUAAAAGGAGAAAGAACAGCCUCAUUUUAGAUGU | |
| | AGUCCUGUUGGAUUUUUUAUGCCUCCUCAGUAACCAGAAAUGUUUUAAAAAACUAAG | |
| | UGUUUAGGAUUUCAAGACAACAUUAUACAUGGCUCUGAAAUAUCUGACACAAUGUAA | |
| | ACAUUGCAGGCACCUGCAUUUUAUGUUUUUUUUUUCAACAAAUGUGACUAAUUUGAA | |
| | ACUUUUAUGAACUUCUGAGCUGUCCCCUUGCAAUUCAACCGCAGUUUGAAUUAAUCA | |
| | UAUCAAAUCAGUUUUAAUUUUUUAAAUUGUACUUCAGAGUCUAUAUUUCAAGGGCAC | |
| | AUUUUCUCACUACUAUUUUAAUACAUUAAAGGACUAAAUAAUCUUUCAGAGAUGCUG | |
| | GAAACAAAUCAUUUGCUUUAUAUGUUUCAUUAGAAUACCAAUGAAACAUACAACUUG | |
| | AAAAUUAGUAAUAGUAUUUUUGAAGAUCCCAUUUCUAAUUGGAGAUCUCUUUAAUUU | |
| | CGAUCAACUUAUAAUGUGUAGUACUAUAUUAAGUGCACUUGAGUGGAAUUCAACAUU | |
| | UGACUAAUAAAAUGAGUUCAUCAUGUUGGCAAGUGAUGUGGCAAUUAUCUCUGGUGA | |
| | CAAAAGAGUAAAAUCAAAUAUUUCUGCCUGUUACAAAUAUCAAGGAAGACCUGCUAC | |
| | UAUGAAAUAGAUGACAUUAAUCUGUCUUCACUGUUUAUAAUACGGAUGGAUUUUUUU | |
| | UCAAAUCAGUGUGUGUUUUGAGGUCUUAUGUAAUUGAUGACAUUUGAGAGAAAUGGU | |
| | GGCUUUUUUUAGCUACCUCUUUGUUCAUUUAAGCACCAGUAAAGAUCAUGUCUUUUU | |
| | AUAGAAGUGUAGAUUUUCUUUGUGACUUUGCUAUCGUGCCUAAAGCUCUAAAUAUAG | |
| | GUGAAUGUGUGAUGAAUACUCAGAUUAUUUGUCUCUCUAUAUAAUUAGUUUGGUACU | |
| | AAGUUUCUCAAAAAAUUAUUAACACAUGAAAGACAAUCUCUAAACCAGAAAAAGAAG | |
| | UAGUACAAAUUUUGUUACUGUAAUGCUCGCGUUUAGUGAGUUUAAAACACACAGUAU | |
| | CUUUUGGUUUUAUAAUCAGUUUCUAUUUUGCUGUGCCUGAGAUUAAGAUCUGUGUAU | |
| | GUGUGUGUGUGUGUGUGUGCGUUUGUGUGUUAAAGCAGAAAAGACUUUUUUAAAAGU | |
| | UUUAAGUGAUAAAUGCAAUUUGUUAAUUGAUCUUAGAUCACUAGUAAACUCAGGGCU | |
| | GAAUUAUACCAUGUAUAUUCUAUUAGAAGAAAGUAAACACCAUCUUUAUUCCUGCCC | |
| | UUUUUCUUCUCUCAAAGUAGUUGUAGUUAUAUCUAGAAAGAAGCAAUUUUGAUUUCU | |
| | UGAAAAGGUAGUUCCUGCACUCAGUUUAAACUAAAAAUAAUCAUACUUGGAUUUUAU | |
| | UUAUUUUUGUCAUAGUAAAAAUUUUAAUUUAUAUAUAUUUUUAUUUAGUAUUAUCUU | |
| | AUUCUUUGCUAUUUGCCAAUCCUUUGUCAUCAAUUGUGUUAAAUGAAUUGAAAAUUC | |
| | AUGCCCUGUUCAUUUUAUUUUACUUUAUUGGUUAGGAUAUUUAAAGGAUUUUUGUAU | |
| | AUAUAAUUUCUUAAAUUAAUAUUCCAAAAGGUUAGUGGACUUAGAUUAUAAAUUAUG | |
| | GCAAAAAUCUAAAAACAACAAAAAUGAUUUUUAUACAUUCUAUUUCAUUAUUCCUCU | |
| | UUUUCCAAUAAGUCAUACAAUUGGUAGAUAUGACUUAUUUUAUUUUUGUAUUAUUCA | |
| | CUAUAUCUUUAUGAUAUUUAAGUAUAAAUAAUUAAAAAAAUUUAUUGUACCUUAUAG | |
| | UCUGUCACCAAAAAAAAAAAAUUAUCUGUAGGUAGUGAAAUGCUAAUGUUGAUUUGU | |
| | CUUUAAGGGCUUGUUAACUAUCCUUUAUUUUCUCAUUUGUCUUAAAUUAGGAGUUUG | |
| | UGUUUAAAUUACUCAUCUAAGCAAAAAAUGUAUAUAAAUCCCAUUACUGGGUAUAUA | |
| | CCCAAAGGAUUAUAAAUCAUGCUGCUAUAAAGACACAUGCACACGUAUGUUUAUUGC | |
| | AGCACUAUUCACAAUAGCAAAGACUUGGAACCAACCCAAAUGUCCAUCAAUGAUAGA | |
| | CUUGAUUAAGAAAAUGUGCACAUAUACACCAUGGAAUACUAUGCAGCCAUAAAAAAG | |
| | GAUGAGUUCAUGUCCUUUGUAGGGACAUGGAUAAAGCUGGAAACCAUCAUUCUGAGC | |
| | AAACUAUUGCAAGGACAGAAAACCAAACACUGCAUGUUCUCACUCAUAGGUGGGAAU | |
| | UGAACAAUGAGAACACUUGGACACAAGGUGGGGAACACCACACACCAGGGCCUGUCA | |
| | UGGGGUGGGGGGAGUGGGGAGGGAUAGCAUUAGGAGAUAUACCUAAUGUAAAUGAUG | |
| | AGUUAAUGGGUGCAGCACACCAACAUGGCACAUGUAUACAUAUGUAGCAAACCUGCA | |
| | CGUUGUGCACAUGUACCCUAGAACUUAAAGUAUAAUUAAAAAAAAAAAGAAAACAGA | |
| | AGCUAUUUAUAAAGAAGUUAUUUGCUGAAAUAAAUGUGAUCUUUCCCAUUAAAAAAA | |
| | UAAAGAAAUUUUGGGGUAAAAAAACACAAUAUAUUGUAUUCUUGAAAAAUUCUAAGA | |
| | GAGUGGAUGUGAAGUGUUCUCACCACAAAAGUGAUAACUAAUUGAGGUAAUGCACAU | |
| | AUUAAUUAGAAAGAUUUUGUCAUUCCACAAUGUAUAUAUACUUAAAAAUAUGUUAUA | |
| | CACAAUAAAUACAUACAUUAAAAAAUAAGUAAAUGUA | |
| 3′UTR-012 | CCCACCCUGCACGCCGGCACCAAACCCUGUCCUCCCACCCCUCCCCACUCAUCACUA | 217 |
| | AACAGAGUAAAAUGUGAUGCGAAUUUUCCCGACCAACCUGAUUCGCUAGAUUUUUUU | |
| | UAAGGAAAAGCUUGGAAAGCCAGGACACAACGCUGCUGCCUGCUUUGUGCAGGGUCC | |
| | UCCGGGGCUCAGCCCUGAGUUGGCAUCACCUGCGCAGGGCCCUCUGGGGCUCAGCCC | |
| | UGAGCUAGUGUCACCUGCACAGGGCCCUCUGAGGCUCAGCCCUGAGCUGGCGUCACC | |
| | UGUGCAGGGCCCUCUGGGGCUCAGCCCUGAGCUGGCCUCACCUGGGUUCCCCACCCC | |
| | GGGCUCUCCUGCCCUGCCCUCCUGCCCGCCCUCCCUCCUGCCUGCGCAGCUCCUUCC | |
| | CUAGGCACCUCUGUGCUGCAUCCCACCAGCCUGAGCAAGACGCCCUCUCGGGGCCUG | |
| | UGCCGCACUAGCCUCCCUCUCCUCUGUCCCCAUAGCUGGUUUUUCCCACCAAUCCUC | |
| | ACCUAACAGUUACUUUACAAUUAAACUCAAAGCAAGCUCUUCUCCUCAGCUUGGGGC | |
| | AGCCAUUGGCCUCUGUCUCGUUUUGGGAAACCAAGGUCAGGAGGCCGUUGCAGACAU | |
| | AAAUCUCGGCGACUCGGCCCCGUCUCCUGAGGGUCCUGCUGGUGACCGGCCUGGACC | |
| | UUGGCCCUACAGCCCUGGAGGCCGCUGCUGACCAGCACUGACCCCGACCUCAGAGAG | |
| | UACUCGCAGGGGCGCUGGCUGCACUCAAGACCCUCGAGAUUAACGGUGCUAACCCCG | |
| | UCUGCUCCUCCCUCCCGCAGAGACUGGGGCCUGGACUGGACAUGAGAGCCCCUUGGU | |
| | GCCACAGAGGGCUGUGUCUUACUAGAAACAACGCAAACCUCUCCUUCCUCAGAAUAG | |
| | UGAUGUGUUCGACGUUUUAUCAAAGGCCCCCUUUCUAUGUUCAUGUUAGUUUUGCUC | |
| | CUUCUGUGUUUUUUUCUGAACCAUAUCCAUGUUGCUGACUUUUCCAAAUAAAGGUUU | |
| | UCACUCCUCUC | |
| 3′UTR-013 | AGAGGCCUGCCUCCAGGGCUGGACUGAGGCCUGAGCGCUCCUGCCGCAGAGCUGGCC | 218 |
| | GCGCCAAAUAAUGUCUCUGUGAGACUCGAGAACUUUCAUUUUUUUCCAGGCUGGUUC | |
| | GGAUUUGGGGUGGAUUUUGGUUUUGUUCCCCUCCUCCACUCUCCCCCACCCCCUCCC | |
| | CGCCCUUUUUUUUUUUUUUUUUUAAACUGGUAUUUUAUCUUUGAUUCUCCUUCAGCC | |
| | CUCACCCCUGGUUCUCAUCUUUCUUGAUCAACAUCUUUUCUUGCCUCUGUCCCCUUC | |
| | UCUCAUCUCUUAGCUCCCCUCCAACCUGGGGGGCAGUGGUGUGGAGAAGCCACAGGC | |
| | CUGAGAUUUCAUCUGCUCUCCUUCCUGGAGCCCAGAGGAGGGCAGCAGAAGGGGGUG | |
| | GUGUCUCCAACCCCCCAGCACUGAGGAAGAACGGGGCUCUUCUCAUUUCACCCCUCC | |
| | CUUUCUCCCCUGCCCCCAGGACUGGGCCACUUCUGGGUGGGGCAGUGGGUCCCAGAU | |
| | UGGCUCACACUGAGAAUGUAAGAACUACAAACAAAAUUUCUAUUAAAUUAAAUUUUG | |
| | UGUCUCC | |
| 3′UTR-014 | CUCCCUCCAUCCCAACCUGGCUCCCUCCCACCCAACCAACUUUCCCCCCAACCCGGA | 219 |
| | AACAGACAAGCAACCCAAACUGAACCCCCUCAAAAGCCAAAAAAUGGGAGACAAUUU | |
| | CACAUGGACUUUGGAAAAUAUUUUUUUCCUUUGCAUUCAUCUCUCAAACUUAGUUUU | |
| | UAUCUUUGACCAACCGAACAUGACCAAAAACCAAAAGUGCAUUCAACCUUACCAAAA | |
| | AAAAAAAAAAAAAAAGAAUAAAUAAAUAACUUUUUAAAAAAGGAAGCUUGGUCCACU | |
| | UGCUUGAAGACCCAUGCGGGGGUAAGUCCCUUUCUGCCCGUUGGGCUUAUGAAACCC | |
| | CAAUGCUGCCCUUUCUGCUCCUUUCUCCACACCCCCCUUGGGGCCUCCCCUCCACUC | |
| | CUUCCCAAAUCUGUCUCCCCAGAAGACACAGGAAACAAUGUAUUGUCUGCCCAGCAA | |
| | UCAAAGGCAAUGCUCAAACACCCAAGUGGCCCCCACCCUCAGCCCGCUCCUGCCCGC | |
| | CCAGCACCCCCAGGCCCUGGGGGACCUGGGGUUCUCAGACUGCCAAAGAAGCCUUGC | |
| | CAUCUGGCGCUCCCAUGGCUCUUGCAACAUCUCCCCUUCGUUUUUGAGGGGGUCAUG | |
| | CCGGGGGAGCCACCAGCCCCUCACUGGGUUCGGAGGAGAGUCAGGAAGGGCCACGAC | |
| | AAAGCAGAAACAUCGGAUUUGGGGAACGCGUGUCAAUCCCUUGUGCCGCAGGGCUGG | |
| | GCGGGAGAGACUGUUCUGUUCCUUGUGUAACUGUGUUGCUGAAAGACUACCUCGUUC | |
| | UUGUCUUGAUGUGUCACCGGGGCAACUGCCUGGGGGCGGGGAUGGGGGCAGGGUGGA | |
| | AGCGGCUCCCCAUUUUAUACCAAAGGUGCUACAUCUAUGUGAUGGGUGGGGUGGGGA | |
| | GGGAAUCACUGGUGCUAUAGAAAUUGAGAUGCCCCCCCAGGCCAGCAAAUGUUCCUU | |
| | UUUGUUCAAAGUCUAUUUUUAUUCCUUGAUAUUUUUCUUUUUUUUUUUUUUUUUUUG | |
| | UGGAUGGGGACUUGUGAAUUUUUCUAAAGGUGCUAUUUAACAUGGGAGGAGAGCGUG | |
| | UGCGGCUCCAGCCCAGCCCGCUGCUCACUUUCCACCCUCUCUCCACCUGCCUCUGGC | |
| | UUCUCAGGCCUCUGCUCUCCGACCUCUCUCCUCUGAAACCCUCCUCCACAGCUGCAG | |
| | CCCAUCCUCCCGGCUCCCUCCUAGUCUGUCCUGCGUCCUCUGUCCCCGGGUUUCAGA | |
| | GACAACUUCCCAAAGCACAAAGCAGUUUUUCCCCCUAGGGGUGGGAGGAAGCAAAAG | |
| | ACUCUGUACCUAUUUUGUAUGUGUAUAAUAAUUUGAGAUGUUUUUAAUUAUUUUGAU | |
| | UGCUGGAAUAAAGCAUGUGGAAAUGACCCAAACAUAAUCCGCAGUGGCCUCCUAAUU | |
| | UCCUUCUUUGGAGUUGGGGGAGGGGUAGACAUGGGGAAGGGGCUUUGGGGUGAUGGG | |
| | CUUGCCUUCCAUUCCUGCCCUUUCCCUCCCCACUAUUCUCUUCUAGAUCCCUCCAUA | |
| | ACCCCACUCCCCUUUCUCUCACCCUUCUUAUACCGCAAACCUUUCUACUUCCUCUUU | |
| | CAUUUUCUAUUCUUGCAAUUUCCUUGCACCUUUUCCAAAUCCUCUUCUCCCCUGCAA | |
| | UACCAUACAGGCAAUCCACGUGCACAACACACACACACACUCUUCACAUCUGGGGUU | |
| | GUCCAAACCUCAUACCCACUCCCCUUCAAGCCCAUCCACUCUCCACCCCCUGGAUGC | |
| | CCUGCACUUGGUGGCGGUGGGAUGCUCAUGGAUACUGGGAGGGUGAGGGGAGUGGAA | |
| | CCCGUGAGGAGGACCUGGGGGCCUCUCCUUGAACUGACAUGAAGGGUCAUCUGGCCU | |
| | CUGCUCCCUUCUCACCCACGCUGACCUCCUGCCGAAGGAGCAACGCAACAGGAGAGG | |
| | GGUCUGCUGAGCCUGGCGAGGGUCUGGGAGGGACCAGGAGGAAGGCGUGCUCCCUGC | |
| | UCGCUGUCCUGGCCCUGGGGGAGUGAGGGAGACAGACACCUGGGAGAGCUGUGGGGA | |
| | AGGCACUCGCACCGUGCUCUUGGGAAGGAAGGAGACCUGGCCCUGCUCACCACGGAC | |
| | UGGGUGCCUCGACCUCCUGAAUCCCCAGAACACAACCCCCCUGGGCUGGGGUGGUCU | |
| | GGGGAACCAUCGUGCCCCCGCCUCCCGCCUACUCCUUUUUAAGCUU | |
| 3′UTR-015 | UUGGCCAGGCCUGACCCUCUUGGACCUUUCUUCUUUGCCGACAACCACUGCCCAGCA | 220 |
| | GCCUCUGGGACCUCGGGGUCCCAGGGAACCCAGUCCAGCCUCCUGGCUGUUGACUUC | |
| | CCAUUGCUCUUGGAGCCACCAAUCAAAGAGAUUCAAAGAGAUUCCUGCAGGCCAGAG | |
| | GCGGAACACACCUUUAUGGCUGGGGCUCUCCGUGGUGUUCUGGACCCAGCCCCUGGA | |
| | GACACCAUUCACUUUUACUGCUUUGUAGUGACUCGUGCUCUCCAACCUGUCUUCCUG | |
| | AAAAACCAAGGCCCCCUUCCCCCACCUCUUCCAUGGGGUGAGACUUGAGCAGAACAG | |
| | GGGCUUCCCCAAGUUGCCCAGAAAGACUGUCUGGGUGAGAAGCCAUGGCCAGAGCUU | |
| | CUCCCAGGCACAGGUGUUGCACCAGGGACUUCUGCUUCAAGUUUUGGGGUAAAGACA | |
| | CCUGGAUCAGACUCCAAGGGCUGCCCUGAGUCUGGGACUUCUGCCUCCAUGGCUGGU | |
| | CAUGAGAGCAAACCGUAGUCCCCUGGAGACAGCGACUCCAGAGAACCUCUUGGGAGA | |
| | CAGAAGAGGCAUCUGUGCACAGCUCGAUCUUCUACUUGCCUGUGGGGAGGGGAGUGA | |
| | CAGGUCCACACACCACACUGGGUCACCCUGUCCUGGAUGCCUCUGAAGAGAGGGACA | |
| | GACCGUCAGAAACUGGAGAGUUUCUAUUAAAGGUCAUUUAAACCA | |
| 3′UTR-016 | UCCUCCGGGACCCCAGCCCUCAGGAUUCCUGAUGCUCCAAGGCGACUGAUGGGCGCU | 221 |
| | GGAUGAAGUGGCACAGUCAGCUUCCCUGGGGGCUGGUGUCAUGUUGGGCUCCUGGGG | |
| | CGGGGGCACGGCCUGGCAUUUCACGCAUUGCUGCCACCCCAGGUCCACCUGUCUCCA | |
| | CUUUCACAGCCUCCAAGUCUGUGGCUCUUCCCUUCUGUCCUCCGAGGGGCUUGCCUU | |
| | CUCUCGUGUCCAGUGAGGUGCUCAGUGAUCGGCUUAACUUAGAGAAGCCCGCCCCCU | |
| | CCCCUUCUCCGUCUGUCCCAAGAGGGUCUGCUCUGAGCCUGCGUUCCUAGGUGGCUC | |
| | GGCCUCAGCUGCCUGGGUUGUGGCCGCCCUAGCAUCCUGUAUGCCCACAGCUACUGG | |
| | AAUCCCCGCUGCUGCUCCGGGCCAAGCUUCUGGUUGAUUAAUGAGGGCAUGGGGUGG | |
| | UCCCUCAAGACCUUCCCCUACCUUUUGUGGAACCAGUGAUGCCUCAAAGACAGUGUC | |
| | CCCUCCACAGCUGGGUGCCAGGGGCAGGGGAUCCUCAGUAUAGCCGGUGAACCCUGA | |
| | UACCAGGAGCCUGGGCCUCCCUGAACCCCUGGCUUCCAGCCAUCUCAUCGCCAGCCU | |
| | CCUCCUGGACCUCUUGGCCCCCAGCCCCUUCCCCACACAGCCCCAGAAGGGUCCCAG | |
| | AGCUGACCCCACUCCAGGACCUAGGCCCAGCCCCUCAGCCUCAUCUGGAGCCCCUGA | |
| | AGACCAGUCCCACCCACCUUUCUGGCCUCAUCUGACACUGCUCCGCAUCCUGCUGUG | |
| | UGUCCUGUUCCAUGUUCCGGUUCCAUCCAAAUACACUUUCUGGAACAAA | |
| 3′UTR-017 | GCUGGAGCCUCGGUGGCCAUGCUUCUUGCCCCUUGGGCCUCCCCCCAGCCCCUCCUC | 222 |
| | CCCUUCCUGCACCCGUACCCCCGUGGUCUUUGAAUAAAGUCUGAGUGGGCGGC | |
| 3′UTR-018 | UGAUAAUAGGCUGGAGCCUCGGUGGCCAUGCUUCUUGCCCCUUGGGCCUCCCCCCAG | 13 |
| | CCCCUCCUCCCCUUCCUGCACCCGUACCCCCGUGGUCUUUGAAUAAAGUCUGAGUGG | |
| | GCGGC | |

[0202] In certain embodiments, the 5′ UTR and/or 3′ UTR sequence of the invention comprises a nucleotide sequence at least about 60%, at least about 70%, at least about 80%, at least about 90%, at least about 95%, at least about 96%, at least about 97%, at least about 98%, at least about 99%, or about 100% identical to a sequence selected from the group consisting of 5′ UTR sequences comprising any of SEQ ID NO:3, 88-102, or 165-167 and/or 3′ UTR sequences comprises any of SEQ ID NO:4, 104-112, or 150, and any combination thereof.

[0203] The polynucleotides of the invention can comprise combinations of features. For example, the ORF can be flanked by a 5′UTR that comprises a strong Kozak translational initiation signal and/or a 3′UTR comprising an oligo(dT) sequence for templated addition of a poly-A tail. A 5′UTR can comprise a first polynucleotide fragment and a second polynucleotide fragment from the same and/or different UTRs (see, e.g., US2010/0293625, herein incorporated by reference in its entirety).

[0204] Other non-UTR sequences can be used as regions or subregions within the polynucleotides of the invention. For example, introns or portions of intron sequences can be incorporated into the polynucleotides of the invention. Incorporation of intronic sequences can increase protein production as well as polynucleotide expression levels. In some embodiments, the polynucleotide of the invention comprises an internal ribosome entry site (IRES) instead of or in addition to a UTR (see, e.g., Yakubov et al., Biochem. Biophys. Res. Commun. 2010 394(1):189-193, the contents of which are incorporated herein by reference in their entirety). In some embodiments, the polynucleotide comprises an IRES instead of a 5′ UTR sequence. In some embodiments, the polynucleotide comprises an ORF and a viral capsid sequence. In some embodiments, the polynucleotide comprises a synthetic 5′ UTR in combination with a non-synthetic 3′ UTR.

[0205] In some embodiments, the UTR can also include at least one translation enhancer polynucleotide, translation enhancer element, or translational enhancer elements (collectively, “TEE,” which refers to nucleic acid sequences that increase the amount of polypeptide or protein produced from a polynucleotide. As a non-limiting example, the TEE can be located between the transcription promoter and the start codon. In some embodiments, the 5′ UTR comprises a TEE.

[0206] In one aspect, a TEE is a conserved element in a UTR that can promote translational activity of a nucleic acid such as, but not limited to, cap-dependent or cap-independent translation.

MicroRNA (miRNA) Binding Sites

[0207] Polynucleotides of the invention can include regulatory elements, for example, microRNA (miRNA) binding sites, transcription factor binding sites, structured mRNA sequences and/or motifs, artificial binding sites engineered to act as pseudo-receptors for endogenous nucleic acid binding molecules, and combinations thereof. In some embodiments, polynucleotides including such regulatory elements are referred to as including “sensor sequences”.

[0208] In some embodiments, a polynucleotide (e.g., a ribonucleic acid (RNA), e.g., a messenger RNA (mRNA)) of the invention comprises an open reading frame (ORF) encoding a polypeptide of interest and further comprises one or more miRNA binding site(s). Inclusion or incorporation of miRNA binding site(s) provides for regulation of polynucleotides of the invention, and in turn, of the polypeptides encoded therefrom, based on tissue-specific and/or cell-type specific expression of naturally-occurring miRNAs.

[0209] The present invention also provides pharmaceutical compositions and formulations that comprise any of the polynucleotides described above. In some embodiments, the composition or formulation further comprises a delivery agent.

[0210] In some embodiments, the composition or formulation can contain a polynucleotide comprising a sequence optimized nucleic acid sequence disclosed herein which encodes a polypeptide. In some embodiments, the composition or formulation can contain a polynucleotide (e.g., a RNA, e.g., an mRNA) comprising a polynucleotide (e.g., an ORF) having significant sequence identity to a sequence optimized nucleic acid sequence disclosed herein which encodes a polypeptide. In some embodiments, the polynucleotide further comprises a miRNA binding site, e.g., a miRNA binding site that binds

[0211] A miRNA, e.g., a natural-occurring miRNA, is a 19-25 nucleotide long noncoding RNA that binds to a polynucleotide and down-regulates gene expression either by reducing stability or by inhibiting translation of the polynucleotide. A miRNA sequence comprises a “seed” region, i.e., a sequence in the region of positions 2-8 of the mature miRNA. A miRNA seed can comprise positions 2-8 or 2-7 of the mature miRNA.

[0212] microRNAs derive enzymatically from regions of RNA transcripts that fold back on themselves to form short hairpin structures often termed a pre-miRNA (precursor-miRNA). A pre-miRNA typically has a two-nucleotide overhang at its 3′ end, and has 3′ hydroxyl and 5′ phosphate groups. This precursor-mRNA is processed in the nucleus and subsequently transported to the cytoplasm where it is further processed by DICER (a RNase III enzyme), to form a mature microRNA of approximately 22 nucleotides. The mature microRNA is then incorporated into a ribonuclear particle to form the RNA-induced silencing complex, RISC, which mediates gene silencing. Art-recognized nomenclature for mature miRNAs typically designates the arm of the pre-miRNA from which the mature miRNA derives; “5p” means the microRNA is from the 5 prime arm of the pre-miRNA hairpin and “3p” means the microRNA is from the 3 prime end of the pre-miRNA hairpin. A miR referred to by number herein can refer to either of the two mature microRNAs originating from opposite arms of the same pre-miRNA (e.g., either the 3p or 5p microRNA). All miRs referred to herein are intended to include both the 3p and 5p arms/sequences, unless particularly specified by the 3p or 5p designation.

[0213] As used herein, the term “microRNA (miRNA or miR) binding site” refers to a sequence within a polynucleotide, e.g., within a DNA or within an RNA transcript, including in the 5′UTR and/or 3′UTR, that has sufficient complementarity to all or a region of a miRNA to interact with, associate with or bind to the miRNA. In some embodiments, a polynucleotide of the invention comprising an ORF encoding a polypeptide of interest and further comprises one or more miRNA binding site(s). In exemplary embodiments, a 5′ UTR and/or 3′ UTR of the polynucleotide (e.g., a ribonucleic acid (RNA), e.g., a messenger RNA (mRNA)) comprises the one or more miRNA binding site(s).

[0214] A miRNA binding site having sufficient complementarity to a miRNA refers to a degree of complementarity sufficient to facilitate miRNA-mediated regulation of a polynucleotide, e.g., miRNA-mediated translational repression or degradation of the polynucleotide. In exemplary aspects of the invention, a miRNA binding site having sufficient complementarity to the miRNA refers to a degree of complementarity sufficient to facilitate miRNA-mediated degradation of the polynucleotide, e.g., miRNA-guided RNA-induced silencing complex (RISC)-mediated cleavage of mRNA. The miRNA binding site can have complementarity to, for example, a 19-25 nucleotide long miRNA sequence, to a 19-23 nucleotide long miRNA sequence, or to a 22 nucleotide long miRNA sequence. A miRNA binding site can be complementary to only a portion of a miRNA, e.g., to a portion less than 1, 2, 3, or 4 nucleotides of the full length of a naturally-occurring miRNA sequence, or to a portion less than 1, 2, 3, or 4 nucleotides shorter than a naturally-occurring miRNA sequence. Full or complete complementarity (e.g., full complementarity or complete complementarity over all or a significant portion of the length of a naturally-occurring miRNA) is preferred when the desired regulation is mRNA degradation.

[0215] In some embodiments, a miRNA binding site includes a sequence that has complementarity (e.g., partial or complete complementarity) with an miRNA seed sequence. In some embodiments, the miRNA binding site includes a sequence that has complete complementarity with a miRNA seed sequence. In some embodiments, a miRNA binding site includes a sequence that has complementarity (e.g., partial or complete complementarity) with an miRNA sequence. In some embodiments, the miRNA binding site includes a sequence that has complete complementarity with a miRNA sequence. In some embodiments, a miRNA binding site has complete complementarity with a miRNA sequence but for 1, 2, or 3 nucleotide substitutions, terminal additions, and/or truncations.

[0216] In some embodiments, the miRNA binding site is the same length as the corresponding miRNA. In other embodiments, the miRNA binding site is one, two, three, four, five, six, seven, eight, nine, ten, eleven or twelve nucleotide(s) shorter than the corresponding miRNA at the 5′ terminus, the 3′ terminus, or both. In still other embodiments, the microRNA binding site is two nucleotides shorter than the corresponding microRNA at the 5′ terminus, the 3′ terminus, or both. The miRNA binding sites that are shorter than the corresponding miRNAs are still capable of degrading the mRNA incorporating one or more of the miRNA binding sites or preventing the mRNA from translation.

[0217] In some embodiments, the miRNA binding site binds the corresponding mature miRNA that is part of an active RISC containing Dicer. In another embodiment, binding of the miRNA binding site to the corresponding miRNA in RISC degrades the mRNA containing the miRNA binding site or prevents the mRNA from being translated. In some embodiments, the miRNA binding site has sufficient complementarity to miRNA so that a RISC complex comprising the miRNA cleaves the polynucleotide comprising the miRNA binding site. In other embodiments, the miRNA binding site has imperfect complementarity so that a RISC complex comprising the miRNA induces instability in the polynucleotide comprising the miRNA binding site. In another embodiment, the miRNA binding site has imperfect complementarity so that a RISC complex comprising the miRNA represses transcription of the polynucleotide comprising the miRNA binding site.

[0218] In some embodiments, the miRNA binding site has one, two, three, four, five, six, seven, eight, nine, ten, eleven or twelve mismatch(es) from the corresponding miRNA. In some embodiments, the miRNA binding site has at least about ten, at least about eleven, at least about twelve, at least about thirteen, at least about fourteen, at least about fifteen, at least about sixteen, at least about seventeen, at least about eighteen, at least about nineteen, at least about twenty, or at least about twenty-one contiguous nucleotides complementary to at least about ten, at least about eleven, at least about twelve, at least about thirteen, at least about fourteen, at least about fifteen, at least about sixteen, at least about seventeen, at least about eighteen, at least about nineteen, at least about twenty, or at least about twenty-one, respectively, contiguous nucleotides of the corresponding miRNA.

[0219] By engineering one or more miRNA binding sites into a polynucleotide of the invention, the polynucleotide can be targeted for degradation or reduced translation, provided the miRNA in question is available. This can reduce off-target effects upon delivery of the polynucleotide. For example, if a polynucleotide of the invention is not intended to be delivered to a tissue or cell but ends up is said tissue or cell, then a miRNA abundant in the tissue or cell can inhibit the expression of the gene of interest if one or multiple binding sites of the miRNA are engineered into the 5′ UTR and/or 3′ UTR of the polynucleotide. Thus, in some embodiments, incorporation of one or more miRNA binding sites into an mRNA of the disclosure may reduce the hazard of off-target effects upon nucleic acid molecule delivery and/or enable tissue-specific regulation of expression of a polypeptide encoded by the mRNA. In yet other embodiments, incorporation of one or more miRNA binding sites into an mRNA of the disclosure can modulate immune responses upon nucleic acid delivery in vivo. In further embodiments, incorporation of one or more miRNA binding sites into an mRNA of the disclosure can modulate accelerated blood clearance (ABC) of lipid-comprising compounds and compositions described herein.

[0220] Conversely, miRNA binding sites can be removed from polynucleotide sequences in which they naturally occur in order to increase protein expression in specific tissues. For example, a binding site for a specific miRNA can be removed from a polynucleotide to improve protein expression in tissues or cells containing the miRNA.

[0221] Regulation of expression in multiple tissues can be accomplished through introduction or removal of one or more miRNA binding sites, e.g., one or more distinct miRNA binding sites. The decision whether to remove or insert a miRNA binding site can be made based on miRNA expression patterns and/or their profilings in tissues and/or cells in development and/or disease. Identification of miRNAs, miRNA binding sites, and their expression patterns and role in biology have been reported (e.g., Bonauer et al., Curr Drug Targets 2010 11:943-949; Anand and Cheresh Curr Opin Hematol 2011 18:171-176; Contreras and Rao Leukemia 2012 26:404-413 (2011 Dec 20. doi: 10.1038/1eu.2011.356); Bartel Cell 2009 136:215-233; Landgraf et al, Cell, 2007 129:1401-1414; Gentner and Naldini, Tissue Antigens. 2012 80:393-403 and all references therein; each of which is incorporated herein by reference in its entirety).

[0222] Examples of tissues where miRNA are known to regulate mRNA, and thereby protein expression, include, but are not limited to, liver (miR-122), muscle (miR-133, miR-206, miR-208), endothelial cells (miR-17-92, miR-126), myeloid cells (miR-142-3p, miR-142-5p, miR-16, miR-21, miR-223, miR-24, miR-27), adipose tissue (let-7, miR-30c), heart (miR-1d, miR-149), kidney (miR-192, miR-194, miR-204), and lung epithelial cells (let-7, miR-133, miR-126).

[0223] Specifically, miRNAs are known to be differentially expressed in immune cells (also called hematopoietic cells), such as antigen presenting cells (APCs) (e.g., dendritic cells and macrophages), macrophages, monocytes, B lymphocytes, T lymphocytes, granulocytes, natural killer cells, etc. Immune cell specific miRNAs are involved in immunogenicity, autoimmunity, the immune-response to infection, inflammation, as well as unwanted immune response after gene therapy and tissue/organ transplantation. Immune cells specific miRNAs also regulate many aspects of development, proliferation, differentiation and apoptosis of hematopoietic cells (immune cells). For example, miR-142 and miR-146 are exclusively expressed in immune cells, particularly abundant in myeloid dendritic cells. It has been demonstrated that the immune response to a polynucleotide can be shut-off by adding miR-142 binding sites to the 3′-UTR of the polynucleotide, enabling more stable gene transfer in tissues and cells. miR-142 efficiently degrades exogenous polynucleotides in antigen presenting cells and suppresses cytotoxic elimination of transduced cells (e.g., Annoni A et al., blood, 2009, 114, 5152-5161; Brown B D, et al., Nat med. 2006, 12(5), 585-591; Brown B D, et al., Blood, 2007, 110(13): 4144-4152, each of which is incorporated herein by reference in its entirety).

[0224] An antigen-mediated immune response can refer to an immune response triggered by foreign antigens, which, when entering an organism, are processed by the antigen presenting cells and displayed on the surface of the antigen presenting cells. T cells can recognize the presented antigen and induce a cytotoxic elimination of cells that express the antigen. Introducing a miR-142 binding site into the 5′ UTR and/or 3′UTR of a polynucleotide of the invention can selectively repress gene expression in antigen presenting cells through miR-142 mediated degradation, limiting antigen presentation in antigen presenting cells (e.g., dendritic cells) and thereby preventing antigen-mediated immune response after the delivery of the polynucleotide. The polynucleotide is then stably expressed in target tissues or cells without triggering cytotoxic elimination.

[0225] In one embodiment, binding sites for miRNAs that are known to be expressed in immune cells, in particular, antigen presenting cells, can be engineered into a polynucleotide of the invention to suppress the expression of the polynucleotide in antigen presenting cells through miRNA mediated RNA degradation, subduing the antigen-mediated immune response. Expression of the polynucleotide is maintained in non-immune cells where the immune cell specific miRNAs are not expressed. For example, in some embodiments, to prevent an immunogenic reaction against a liver specific protein, any miR-122 binding site can be removed and a miR-142 (and/or mirR-146) binding site can be engineered into the 5′ UTR and/or 3′ UTR of a polynucleotide of the invention.

[0226] To further drive the selective degradation and suppression in APCs and macrophage, a polynucleotide of the invention can include a further negative regulatory element in the 5′ UTR and/or 3′ UTR, either alone or in combination with miR-142 and/or miR-146 binding sites. As a non-limiting example, the further negative regulatory element is a Constitutive Decay Element (CDE).

[0227] Immune cell specific miRNAs include, but are not limited to, hsa-let-7a-2-3p, hsa-let-7a-3p, hsa-7a-5p, hsa-let-7c, hsa-let-7e-3p, hsa-let-7e-5p, hsa-let-7g-3p, hsa-let-7g-5p, hsa-let-7i-3p, hsa-let-7i-5p, miR-10a-3p, miR-10a-5p, miR-1184, hsa-let-7f-1-3p, hsa-let-7f-2-5p, hsa-let-7f-5p, miR-125b-1-3p, miR-125b-2-3p, miR-125b-5p, miR-1279, miR-130a-3p, miR-130a-5p, miR-132-3p, miR-132-5p, miR-142-3p, miR-142-5p, miR-143-3p, miR-143-5p, miR-146a-3p, miR-146a-5p, miR-146b-3p, miR-146b-5p, miR-147a, miR-147b, miR-148a-5p, miR-148a-3p, miR-150-3p, miR-150-5p, miR-151b, miR-155-3p, miR-155-5p, miR-15a-3p, miR-15a-5p, miR-15b-5p, miR-15b-3p, miR-16-1-3p, miR-16-2-3p, miR-16-5p, miR-17-5p, miR-181a-3p, miR-181a-5p, miR-181a-2-3p, miR-182-3p, miR-182-5p, miR-197-3p, miR-197-5p, miR-21-5p, miR-21-3p, miR-214-3p, miR-214-5p, miR-223-3p, miR-223-5p, miR-221-3p, miR-221-5p, miR-23b-3p, miR-23b-5p, miR-24-1-5p, miR-24-2-5p, miR-24-3p, miR-26a-1-3p, miR-26a-2-3p, miR-26a-5p, miR-26b-3p, miR-26b-5p, miR-27a-3p, miR-27a-5p, miR-27b-3p,miR-27b-5p, miR-28-3p, miR-28-5p, miR-2909, miR-29a-3p, miR-29a-5p, miR-29b-1-5p, miR-29b-2-5p, miR-29c-3p, miR-29c-5p, miR-30e-3p, miR-30e-5p, miR-331-5p, miR-339-3p, miR-339-5p, miR-345-3p, miR-345-5p, miR-346, miR-34a-3p, miR-34a-5p, miR-363-3p, miR-363-5p, miR-372, miR-377-3p, miR-377-5p, miR-493-3p, miR-493-5p, miR-542, miR-548b-5p, miR548c-5p, miR-548i, miR-548j, miR-548n, miR-574-3p, miR-598, miR-718, miR-935, miR-99a-3p, miR-99a-5p, miR-99b-3p, and miR-99b-5p. Furthermore, novel miRNAs can be identified in immune cell through micro-array hybridization and microtome analysis (e.g., Jima D D et al, Blood, 2010, 116:e118-e127; Vaz C et al., BMC Genomics, 2010, 11, 288, the content of each of which is incorporated herein by reference in its entirety.)

[0228] miRNAs that are known to be expressed in the liver include, but are not limited to, miR-107, miR-122-3p, miR-122-5p, miR-1228-3p, miR-1228-5p, miR-1249, miR-129-5p, miR-1303, miR-151a-3p, miR-151a-5p, miR-152, miR-194-3p, miR-194-5p, miR-199a-3p, miR-199a-5p, miR-199b-3p, miR-199b-5p, miR-296-5p, miR-557, miR-581, miR-939-3p, and miR-939-5p. miRNA binding sites from any liver specific miRNA can be introduced to or removed from a polynucleotide of the invention to regulate expression of the polynucleotide in the liver. Liver specific miRNA binding sites can be engineered alone or further in combination with immune cell (e.g., APC) miRNA binding sites in a polynucleotide of the invention.

[0229] miRNAs that are known to be expressed in the lung include, but are not limited to, let-7a-2-3p, let-7a-3p, let-7a-5p, miR-126-3p, miR-126-5p, miR-127-3p, miR-127-5p, miR-130a-3p, miR-130a-5p, miR-130b-3p, miR-130b-5p, miR-133a, miR-133b, miR-134, miR-18a-3p, miR-18a-5p, miR-18b-3p, miR-18b-5p, miR-24-1-5p, miR-24-2-5p, miR-24-3p, miR-296-3p, miR-296-5p, miR-32-3p, miR-337-3p, miR-337-5p, miR-381-3p, and miR-381-5p. miRNA binding sites from any lung specific miRNA can be introduced to or removed from a polynucleotide of the invention to regulate expression of the polynucleotide in the lung. Lung specific miRNA binding sites can be engineered alone or further in combination with immune cell (e.g., APC) miRNA binding sites in a polynucleotide of the invention.

[0230] miRNAs that are known to be expressed in the heart include, but are not limited to, miR-1, miR-133a, miR-133b, miR-149-3p, miR-149-5p, miR-186-3p, miR-186-5p, miR-208a, miR-208b, miR-210, miR-296-3p, miR-320, miR-451a, miR-451b, miR-499a-3p, miR-499a-5p, miR-499b-3p, miR-499b-5p, miR-744-3p, miR-744-5p, miR-92b-3p, and miR-92b-5p. miRNA binding sites from any heart specific microRNA can be introduced to or removed from a polynucleotide of the invention to regulate expression of the polynucleotide in the heart. Heart specific miRNA binding sites can be engineered alone or further in combination with immune cell (e.g., APC) miRNA binding sites in a polynucleotide of the invention.

[0231] miRNAs that are known to be expressed in the nervous system include, but are not limited to, miR-124-5p, miR-125a-3p, miR-125a-5p, miR-125b-1-3p, miR-125b-2-3p, miR-125b-5p,miR-1271-3p, miR-1271-5p, miR-128, miR-132-5p, miR-135a-3p, miR-135a-5p, miR-135b-3p, miR-135b-5p, miR-137, miR-139-5p, miR-139-3p, miR-149-3p, miR-149-5p, miR-153, miR-181c-3p, miR-181c-5p, miR-183-3p, miR-183-5p, miR-190a, miR-190b, miR-212-3p, miR-212-5p, miR-219-1-3p, miR-219-2-3p, miR-23a-3p, miR-23a-5p,miR-30a-5p, miR-30b-3p, miR-30b-5p, miR-30c-1-3p, miR-30c-2-3p, miR-30c-5p, miR-30d-3p, miR-30d-5p, miR-329, miR-342-3p, miR-3665, miR-3666, miR-380-3p, miR-380-5p, miR-383, miR-410, miR-425-3p, miR-425-5p, miR-454-3p, miR-454-5p, miR-483, miR-510, miR-516a-3p, miR-548b-5p, miR-548c-5p, miR-571, miR-7-1-3p, miR-7-2-3p, miR-7-5p, miR-802, miR-922, miR-9-3p, and miR-9-5p. miRNAs enriched in the nervous system further include those specifically expressed in neurons, including, but not limited to, miR-132-3p, miR-132-3p, miR-148b-3p, miR-148b-5p, miR-151a-3p, miR-151a-5p, miR-212-3p, miR-212-5p, miR-320b, miR-320e, miR-323a-3p, miR-323a-5p, miR-324-5p, miR-325, miR-326, miR-328, miR-922 and those specifically expressed in glial cells, including, but not limited to, miR-1250, miR-219-1-3p, miR-219-2-3p, miR-219-5p, miR-23a-3p, miR-23a-5p, miR-3065-3p, miR-3065-5p, miR-30e-3p, miR-30e-5p, miR-32-5p, miR-338-5p, and miR-657. miRNA binding sites from any CNS specific miRNA can be introduced to or removed from a polynucleotide of the invention to regulate expression of the polynucleotide in the nervous system. Nervous system specific miRNA binding sites can be engineered alone or further in combination with immune cell (e.g., APC) miRNA binding sites in a polynucleotide of the invention.

[0232] miRNAs that are known to be expressed in the pancreas include, but are not limited to, miR-105-3p, miR-105-5p, miR-184, miR-195-3p, miR-195-5p, miR-196a-3p, miR-196a-5p, miR-214-3p, miR-214-5p, miR-216a-3p, miR-216a-5p, miR-30a-3p, miR-33a-3p, miR-33a-5p, miR-375, miR-7-1-3p, miR-7-2-3p, miR-493-3p, miR-493-5p, and miR-944. miRNA binding sites from any pancreas specific miRNA can be introduced to or removed from a polynucleotide of the invention to regulate expression of the polynucleotide in the pancreas. Pancreas specific miRNA binding sites can be engineered alone or further in combination with immune cell (e.g. APC) miRNA binding sites in a polynucleotide of the invention.

[0233] miRNAs that are known to be expressed in the kidney include, but are not limited to, miR-122-3p, miR-145-5p, miR-17-5p, miR-192-3p, miR-192-5p, miR-194-3p, miR-194-5p, miR-20a-3p, miR-20a-5p, miR-204-3p, miR-204-5p, miR-210, miR-216a-3p, miR-216a-5p, miR-296-3p, miR-30a-3p, miR-30a-5p, miR-30b-3p, miR-30b-5p, miR-30c-1-3p, miR-30c-2-3p, miR30c-5p, miR-324-3p, miR-335-3p, miR-335-5p, miR-363-3p, miR-363-5p, and miR-562. miRNA binding sites from any kidney specific miRNA can be introduced to or removed from a polynucleotide of the invention to regulate expression of the polynucleotide in the kidney. Kidney specific miRNA binding sites can be engineered alone or further in combination with immune cell (e.g., APC) miRNA binding sites in a polynucleotide of the invention.

[0234] miRNAs that are known to be expressed in the muscle include, but are not limited to, let-7g-3p, let-7g-5p, miR-1, miR-1286, miR-133a, miR-133b, miR-140-3p, miR-143-3p, miR-143-5p, miR-145-3p, miR-145-5p, miR-188-3p, miR-188-5p, miR-206, miR-208a, miR-208b, miR-25-3p, and miR-25-5p. MiRNA binding sites from any muscle specific miRNA can be introduced to or removed from a polynucleotide of the invention to regulate expression of the polynucleotide in the muscle. Muscle specific miRNA binding sites can be engineered alone or further in combination with immune cell (e.g., APC) miRNA binding sites in a polynucleotide of the invention.

[0235] miRNAs are also differentially expressed in different types of cells, such as, but not limited to, endothelial cells, epithelial cells, and adipocytes.

[0236] miRNAs that are known to be expressed in endothelial cells include, but are not limited to, let-7b-3p, let-7b-5p, miR-100-3p, miR-100-5p, miR-101-3p, miR-101-5p, miR-126-3p, miR-126-5p, miR-1236-3p, miR-1236-5p, miR-130a-3p, miR-130a-5p, miR-17-5p, miR-17-3p, miR-18a-3p, miR-18a-5p, miR-19a-3p, miR-19a-5p, miR-19b-1-5p, miR-19b-2-5p, miR-19b-3p, miR-20a-3p, miR-20a-5p, miR-217, miR-210, miR-21-3p, miR-21-5p, miR-221-3p, miR-221-5p, miR-222-3p, miR-222-5p, miR-23a-3p, miR-23a-5p, miR-296-5p, miR-361-3p, miR-361-5p, miR-421, miR-424-3p, miR-424-5p, miR-513a-5p, miR-92a-1-5p, miR-92a-2-5p, miR-92a-3p, miR-92b-3p, and miR-92b-5p. Many novel miRNAs are discovered in endothelial cells from deep-sequencing analysis (e.g., Voellenkle C et al., RNA, 2012, 18, 472-484, herein incorporated by reference in its entirety). miRNA binding sites from any endothelial cell specific miRNA can be introduced to or removed from a polynucleotide of the invention to regulate expression of the polynucleotide in the endothelial cells.

[0237] miRNAs that are known to be expressed in epithelial cells include, but are not limited to, let-7b-3p, let-7b-5p, miR-1246, miR-200a-3p, miR-200a-5p, miR-200b-3p, miR-200b-5p, miR-200c-3p, miR-200c-5p, miR-338-3p, miR-429, miR-451a, miR-451b, miR-494, miR-802 and miR-34a, miR-34b-5p, miR-34c-5p, miR-449a, miR-449b-3p, miR-449b-5p specific in respiratory ciliated epithelial cells, let-7 family, miR-133a, miR-133b, miR-126 specific in lung epithelial cells, miR-382-3p, miR-382-5p specific in renal epithelial cells, and miR-762 specific in corneal epithelial cells. miRNA binding sites from any epithelial cell specific miRNA can be introduced to or removed from a polynucleotide of the invention to regulate expression of the polynucleotide in the epithelial cells.

[0238] In addition, a large group of miRNAs are enriched in embryonic stem cells, controlling stem cell self-renewal as well as the development and/or differentiation of various cell lineages, such as neural cells, cardiac, hematopoietic cells, skin cells, osteogenic cells and muscle cells (e.g., Kuppusamy K T et al., Curr. Mol Med, 2013, 13(5), 757-764; Vidigal J A and Ventura A, Semin Cancer Biol. 2012, 22(5-6), 428-436; Goff L A et al., PLoS One, 2009, 4:e7192; Morin R D et al., Genome Res, 2008, 18, 610-621; Yoo J K et al., Stem Cells Dev. 2012, 21(11), 2049-2057, each of which is herein incorporated by reference in its entirety). miRNAs abundant in embryonic stem cells include, but are not limited to, let-7a-2-3p, let-a-3p, let-7a-5p, let7d-3p, let-7d-5p, miR-103a-2-3p, miR-103a-5p, miR-106b-3p, miR-106b-5p, miR-1246, miR-1275, miR-138-1-3p, miR-138-2-3p, miR-138-5p, miR-154-3p, miR-154-5p, miR-200c-3p, miR-200c-5p, miR-290, miR-301a-3p, miR-301a-5p, miR-302a-3p, miR-302a-5p, miR-302b-3p, miR-302b-5p, miR-302c-3p, miR-302c-5p, miR-302d-3p, miR-302d-5p, miR-302e, miR-367-3p, miR-367-5p, miR-369-3p, miR-369-5p, miR-370, miR-371, miR-373, miR-380-5p, miR-423-3p, miR-423-5p, miR-486-5p, miR-520c-3p, miR-548e, miR-548f, miR-548g-3p, miR-548g-5p, miR-548i, miR-548k, miR-5481, miR-548m, miR-548n, miR-5480-3p, miR-5480-5p, miR-548p, miR-664a-3p, miR-664a-5p, miR-664b-3p, miR-664b-5p, miR-766-3p, miR-766-5p, miR-885-3p, miR-885-5p, miR-93-3p, miR-93-5p, miR-941,miR-96-3p, miR-96-5p, miR-99b-3p and miR-99b-5p. Many predicted novel miRNAs are discovered by deep sequencing in human embryonic stem cells (e.g., Morin R D et al., Genome Res, 2008, 18, 610-621; Goff L A et al., PLoS One, 2009, 4:e7192; Bar M et al., Stem cells, 2008, 26, 2496-2505, the content of each of which is incorporated herein by reference in its entirety).

[0239] In some embodiments, miRNAs are selected based on expression and abundance in immune cells of the hematopoietic lineage, such as B cells, T cells, macrophages, dendritic cells, and cells that are known to express TLR7/TLR8 and/or able to secrete cytokines such as endothelial cells and platelets. In some embodiments, the miRNA set thus includes miRs that may be responsible in part for the immunogenicity of these cells, and such that a corresponding miR-site incorporation in polynucleotides of the present invention (e.g., mRNAs) could lead to destabilization of the mRNA and/or suppression of translation from these mRNAs in the specific cell type. Non-limiting representative examples include miR-142, miR-144, miR-150, miR-155 and miR-223, which are specific for many of the hematopoietic cells; miR-142, miR150, miR-16 and miR-223, which are expressed in B cells; miR-223, miR-451, miR-26a, miR-16, which are expressed in progenitor hematopoietic cells; and miR-126, which is expressed in plasmacytoid dendritic cells, platelets and endothelial cells. For further discussion of tissue expression of miRs see e.g., Teruel-Montoya, R. et al. (2014) PLoS One 9:e102259; Landgraf, P. et al. (2007) Cell 129:1401-1414; Bissels, U. et al. (2009) RNA 15:2375-2384. Any one miR-site incorporation in the 3′ UTR and/or 5′ UTR may mediate such effects in multiple cell types of interest (e.g., miR-142 is abundant in both B cells and dendritic cells).

[0240] In some embodiments, it may be beneficial to target the same cell type with multiple miRs and to incorporate binding sites to each of the 3p and 5p arm if both are abundant (e.g., both miR-142-3p and miR142-5p are abundant in hematopoietic stem cells). Thus, in certain embodiments, polynucleotides of the invention contain two or more (e.g., two, three, four or more) miR bindings sites from: (i) the group consisting of miR-142, miR-144, miR-150, miR-155 and miR-223 (which are expressed in many hematopoietic cells); or (ii) the group consisting of miR-142, miR150, miR-16 and miR-223 (which are expressed in B cells); or the group consisting of miR-223, miR-451, miR-26a, miR-16 (which are expressed in progenitor hematopoietic cells).

[0241] In some embodiments, it may also be beneficial to combine various miRs such that multiple cell types of interest are targeted at the same time (e.g., miR-142 and miR-126 to target many cells of the hematopoietic lineage and endothelial cells). Thus, for example, in certain embodiments, polynucleotides of the invention comprise two or more (e.g., two, three, four or more) miRNA bindings sites, wherein: (i) at least one of the miRs targets cells of the hematopoietic lineage (e.g., miR-142, miR-144, miR-150, miR-155 or miR-223) and at least one of the miRs targets plasmacytoid dendritic cells, platelets or endothelial cells (e.g., miR-126); or (ii) at least one of the miRs targets B cells (e.g., miR-142, miR150, miR-16 or miR-223) and at least one of the miRs targets plasmacytoid dendritic cells, platelets or endothelial cells (e.g., miR-126); or (iii) at least one of the miRs targets progenitor hematopoietic cells (e.g., miR-223, miR-451, miR-26a or miR-16) and at least one of the miRs targets plasmacytoid dendritic cells, platelets or endothelial cells (e.g., miR-126); or (iv) at least one of the miRs targets cells of the hematopoietic lineage (e.g., miR-142, miR-144, miR-150, miR-155 or miR-223), at least one of the miRs targets B cells (e.g., miR-142, miR150, miR-16 or miR-223) and at least one of the miRs targets plasmacytoid dendritic cells, platelets or endothelial cells (e.g., miR-126); or any other possible combination of the foregoing four classes of miR binding sites (i.e., those targeting the hematopoietic lineage, those targeting B cells, those targeting progenitor hematopoietic cells and/or those targeting plasmacytoid dendritic cells/platelets/endothelial cells).

[0242] In one embodiment, to modulate immune responses, polynucleotides of the present invention can comprise one or more miRNA binding sequences that bind to one or more miRs that are expressed in conventional immune cells or any cell that expresses TLR7 and/or TLR8 and secrete pro-inflammatory cytokines and/or chemokines (e.g., in immune cells of peripheral lymphoid organs and/or splenocytes and/or endothelial cells). It has now been discovered that incorporation into an mRNA of one or more miRs that are expressed in conventional immune cells or any cell that expresses TLR7 and/or TLR8 and secrete pro-inflammatory cytokines and/or chemokines (e.g., in immune cells of peripheral lymphoid organs and/or splenocytes and/or endothelial cells) reduces or inhibits immune cell activation (e.g., B cell activation, as measured by frequency of activated B cells) and/or cytokine production (e.g., production of IL-6, IFN-γ and/or TNFα). Furthermore, it has now been discovered that incorporation into an mRNA of one or more miRs that are expressed in conventional immune cells or any cell that expresses TLR7 and/or TLR8 and secrete pro-inflammatory cytokines and/or chemokines (e.g., in immune cells of peripheral lymphoid organs and/or splenocytes and/or endothelial cells) can reduce or inhibit an anti-drug antibody (ADA) response against a protein of interest encoded by the mRNA.

[0243] In another embodiment, to modulate accelerated blood clearance of a polynucleotide delivered in a lipid-comprising compound or composition, polynucleotides of the invention can comprise one or more miR binding sequences that bind to one or more miRNAs expressed in conventional immune cells or any cell that expresses TLR7 and/or TLR8 and secrete pro-inflammatory cytokines and/or chemokines (e.g., in immune cells of peripheral lymphoid organs and/or splenocytes and/or endothelial cells). It has now been discovered that incorporation into an mRNA of one or more miR binding sites reduces or inhibits accelerated blood clearance (ABC) of the lipid-comprising compound or composition for use in delivering the mRNA. Furthermore, it has now been discovered that incorporation of one or more miR binding sites into an mRNA reduces serum levels of anti-PEG anti-IgM (e.g., reduces or inhibits the acute production of IgMs that recognize polyethylene glycol (PEG) by B cells) and/or reduces or inhibits proliferation and/or activation of plasmacytoid dendritic cells following administration of a lipid-comprising compound or composition comprising the mRNA.

[0244] In some embodiments, miR sequences may correspond to any known microRNA expressed in immune cells, including but not limited to those taught in US Publication US2005/0261218 and US Publication US2005/0059005, the contents of which are incorporated herein by reference in their entirety. Non-limiting examples of miRs expressed in immune cells include those expressed in spleen cells, myeloid cells, dendritic cells, plasmacytoid dendritic cells, B cells, T cells and/or macrophages. For example, miR-142-3p, miR-142-5p, miR-16, miR-21, miR-223, miR-24 and miR-27 are expressed in myeloid cells, miR-155 is expressed in dendritic cells, B cells and T cells, miR-146 is upregulated in macrophages upon TLR stimulation and miR-126 is expressed in plasmacytoid dendritic cells. In certain embodiments, the miR(s) is expressed abundantly or preferentially in immune cells. For example, miR-142 (miR-142-3p and/or miR-142-5p), miR-126 (miR-126-3p and/or miR-126-5p), miR-146 (miR-146-3p and/or miR-146-5p) and miR-155 (miR-155-3p and/or miR155-5p) are expressed abundantly in immune cells. These microRNA sequences are known in the art and, thus, one of ordinary skill in the art can readily design binding sequences or target sequences to which these microRNAs will bind based upon Watson-Crick complementarity.

[0245] Accordingly, in various embodiments, polynucleotides of the present invention comprise at least one microRNA binding site for a miR selected from the group consisting of miR-142, miR-146, miR-155, miR-126, miR-16, miR-21, miR-223, miR-24 and miR-27. In another embodiment, the mRNA comprises at least two miR binding sites for microRNAs expressed in immune cells. In various embodiments, the polynucleotide of the invention comprises 1-4, one, two, three or four miR binding sites for microRNAs expressed in immune cells. In another embodiment, the polynucleotide of the invention comprises three miR binding sites. These miR binding sites can be for microRNAs selected from the group consisting of miR-142, miR-146, miR-155, miR-126, miR-16, miR-21, miR-223, miR-24, miR-27, and combinations thereof. In one embodiment, the polynucleotide of the invention comprises two or more (e.g., two, three, four) copies of the same miR binding site expressed in immune cells, e.g., two or more copies of a miR binding site selected from the group of miRs consisting of miR-142, miR-146, miR-155, miR-126, miR-16, miR-21, miR-223, miR-24, miR-27.

[0246] In one embodiment, the polynucleotide of the invention comprises three copies of the same miRNA binding site. In certain embodiments, use of three copies of the same miR binding site can exhibit beneficial properties as compared to use of a single miRNA binding site. Non-limiting examples of sequences for 3′ UTRs containing three miRNA bindings sites are shown in SEQ ID NO:199 (three miR-142-3p binding sites) and SEQ ID NO:190 (three miR-142-5p binding sites).

[0247] In another embodiment, the polynucleotide of the invention comprises two or more (e.g., two, three, four) copies of at least two different miR binding sites expressed in immune cells. Non-limiting examples of sequences of 3′ UTRs containing two or more different miR binding sites are shown in SEQ ID NO:173 (one miR-142-3p binding site and one miR-126-3p binding site), SEQ ID NO:179 (two miR-142-5p binding sites and one miR-142-3p binding sites), and SEQ ID NO:182 (two miR-155-5p binding sites and one miR-142-3p binding sites).

[0248] In another embodiment, the polynucleotide of the invention comprises at least two miR binding sites for microRNAs expressed in immune cells, wherein one of the miR binding sites is for miR-142-3p. In various embodiments, the polynucleotide of the invention comprises binding sites for miR-142-3p and miR-155 (miR-155-3p or miR-155-5p), miR-142-3p and miR-146 (miR-146-3 or miR-146-5p), or miR-142-3p and miR-126 (miR-126-3p or miR-126-5p).

[0249] In another embodiment, the polynucleotide of the invention comprises at least two miR binding sites for microRNAs expressed in immune cells, wherein one of the miR binding sites is for miR-126-3p. In various embodiments, the polynucleotide of the invention comprises binding sites for miR-126-3p and miR-155 (miR-155-3p or miR-155-5p), miR-126-3p and miR-146 (miR-146-3p or miR-146-5p), or miR-126-3p and miR-142 (miR-142-3p or miR-142-5p).

[0250] In another embodiment, the polynucleotide of the invention comprises at least two miR binding sites for microRNAs expressed in immune cells, wherein one of the miR binding sites is for miR-142-5p. In various embodiments, the polynucleotide of the invention comprises binding sites for miR-142-5p and miR-155 (miR-155-3p or miR-155-5p), miR-142-5p and miR-146 (miR-146-3 or miR-146-5p), or miR-142-5p and miR-126 (miR-126-3p or miR-126-5p).

[0251] In yet another embodiment, the polynucleotide of the invention comprises at least two miR binding sites for microRNAs expressed in immune cells, wherein one of the miR binding sites is for miR-155-5p. In various embodiments, the polynucleotide of the invention comprises binding sites for miR-155-5p and miR-142 (miR-142-3p or miR-142-5p), miR-155-5p and miR-146 (miR-146-3 or miR-146-5p), or miR-155-5p and miR-126 (miR-126-3p or miR-126-5p).

[0252] miRNA can also regulate complex biological processes such as angiogenesis (e.g., miR-132) (Anand and Cheresh, Curr Opin Hematol 2011 18:171-176). In the polynucleotides of the invention, miRNA binding sites that are involved in such processes can be removed or introduced, in order to tailor the expression of the polynucleotides to biologically relevant cell types or relevant biological processes. In this context, the polynucleotides of the invention are defined as auxotrophic polynucleotides.

[0253] In some embodiments, a polynucleotide of the invention comprises a miRNA binding site, wherein the miRNA binding site comprises one or more nucleotide sequences selected from Table 3, including one or more copies of any one or more of the miRNA binding site sequences. In some embodiments, a polynucleotide of the invention further comprises at least one, two, three, four, five, six, seven, eight, nine, ten, or more of the same or different miRNA binding sites selected from Table 3, including any combination thereof.

[0254] In some embodiments, the miRNA binding site binds to miR-142 or is complementary to miR-142. In some embodiments, the miR-142 comprises SEQ ID NO:144. In some embodiments, the miRNA binding site binds to miR-142-3p or miR-142-5p. In some embodiments, the miR-142-3p binding site comprises SEQ ID NO:146. In some embodiments, the miR-142-5p binding site comprises SEQ ID NO:148. In some embodiments, the miRNA binding site comprises a nucleotide sequence at least 80%, at least 85%, at least 90%, at least 95%, or 100% identical to SEQ ID NO:146 or SEQ ID NO:148.

[0255] In some embodiments, the miRNA binding site binds to miR-126 or is complementary to miR-126. In some embodiments, the miR-126 comprises SEQ ID NO:149. In some embodiments, the miRNA binding site binds to miR-126-3p or miR-126-5p. In some embodiments, the miR-126-3p binding site comprises SEQ ID NO:151. In some embodiments, the miR-126-5p binding site comprises SEQ ID NO:153. In some embodiments, the miRNA binding site comprises a nucleotide sequence at least 80%, at least 85%, at least 90%, at least 95%, or 100% identical to SEQ ID NO:151 or SEQ ID NO:153.

[0256] In one embodiment, the 3′ UTR comprises two miRNA binding sites, wherein a first miRNA binding site binds to miR-142 and a second miRNA binding site binds to miR-126. In a specific embodiment, the 3′ UTR binding to miR-142 and miR-126 comprises, consists, or consists essentially of the sequence of SEQ ID NO: 173 or 195.

TABLE 3
miR-142, miR-126, and miR-142 and
miR-126 binding sites

| SEQ ID | | |
|---|---|---|
| NO | Description | Sequence |
| 144 | miR-142 | GACAGUGCAGUCACCCAUAAAGUAGAAAG |
| | | CACUACUAACAGCACUGGAGGGUGUAGUG |
| | | UUUCCUACUUUAUGGAUGAGUGUACUGUG |
| 145 | miR-142-3p | uguaguguuuccuacuuuaugga |
| 146 | miR-142-3p | uccauaaaguaggaaacacuaca |
| | binding site | |
| 147 | miR-142-5p | cauaaaguagaaagcacuacu |
| 148 | miR-142-5p | aguagugcuuucuacuuuaug |
| | binding site | |
| 149 | miR-126 | CGCUGGCGACGGGACAUUAUUACUUUUGG |
| | | UACGCGCUGUGACACUUCAAACUCGUACC |
| | | GUGAGUAAUAAUGCGCCGUCCACGGCA |
| 150 | miR-126-3p | UCGUACCGUGAGUAAUAAUGCG |
| 151 | miR-126-3p | CGCAUUAUUACUCACGGUACGA |
| | binding site | |
| 152 | miR-126-5p | CAUUAUUACUUUUGGUACGCG |
| 153 | miR-126-5p | CGCGUACCAAAAGUAAUAAUG |
| | binding site | |

[0257] In some embodiments, a miRNA binding site is inserted in the polynucleotide of the invention in any position of the polynucleotide (e.g., the 5′ UTR and/or 3′ UTR). In some embodiments, the 5′ UTR comprises a miRNA binding site. In some embodiments, the 3′ UTR comprises a miRNA binding site. In some embodiments, the 5′ UTR and the 3′ UTR comprise a miRNA binding site. The insertion site in the polynucleotide can be anywhere in the polynucleotide as long as the insertion of the miRNA binding site in the polynucleotide does not interfere with the translation of a functional polypeptide in the absence of the corresponding miRNA; and in the presence of the miRNA, the insertion of the miRNA binding site in the polynucleotide and the binding of the miRNA binding site to the corresponding miRNA are capable of degrading the polynucleotide or preventing the translation of the polynucleotide.

[0258] In some embodiments, a miRNA binding site is inserted in at least about 30 nucleotides downstream from the stop codon of an ORF in a polynucleotide of the invention comprising the ORF. In some embodiments, a miRNA binding site is inserted in at least about 10 nucleotides, at least about 15 nucleotides, at least about 20 nucleotides, at least about 25 nucleotides, at least about 30 nucleotides, at least about 35 nucleotides, at least about 40 nucleotides, at least about 45 nucleotides, at least about 50 nucleotides, at least about 55 nucleotides, at least about 60 nucleotides, at least about 65 nucleotides, at least about 70 nucleotides, at least about 75 nucleotides, at least about 80 nucleotides, at least about 85 nucleotides, at least about 90 nucleotides, at least about 95 nucleotides, or at least about 100 nucleotides downstream from the stop codon of an ORF in a polynucleotide of the invention. In some embodiments, a miRNA binding site is inserted in about 10 nucleotides to about 100 nucleotides, about 20 nucleotides to about 90 nucleotides, about 30 nucleotides to about 80 nucleotides, about 40 nucleotides to about 70 nucleotides, about 50 nucleotides to about 60 nucleotides, about 45 nucleotides to about 65 nucleotides downstream from the stop codon of an ORF in a polynucleotide of the invention.

[0259] In some embodiments, a miRNA binding site is inserted within the 3′ UTR immediately following the stop codon of the coding region within the polynucleotide of the invention, e.g., mRNA. In some embodiments, if there are multiple copies of a stop codon in the construct, a miRNA binding site is inserted immediately following the final stop codon. In some embodiments, a miRNA binding site is inserted further downstream of the stop codon, in which case there are 3′ UTR bases between the stop codon and the miR binding site(s). In some embodiments, three non-limiting examples of possible insertion sites for a miR in a 3′ UTR are shown in SEQ ID NOs: 183, 184, and 185, which show a 3′ UTR sequence with a miR-142-3p site inserted in one of three different possible insertion sites, respectively, within the 3′ UTR.

[0260] In some embodiments, one or more miRNA binding sites can be positioned within the 5′ UTR at one or more possible insertion sites. For example, three non-limiting examples of possible insertion sites for a miR in a 5′ UTR are shown in SEQ ID NOs: 187-189, which show a 5′ UTR sequence with a miR-142-3p site inserted into one of three different possible insertion sites, respectively, within the 5′ UTR.

[0261] In one embodiment, a codon optimized open reading frame encoding a polypeptide of interest comprises a stop codon and the at least one microRNA binding site is located within the 3′ UTR 1-100 nucleotides after the stop codon. In one embodiment, the codon optimized open reading frame encoding the polypeptide of interest comprises a stop codon and the at least one microRNA binding site for a miR expressed in immune cells is located within the 3′ UTR 30-50 nucleotides after the stop codon. In another embodiment, the codon optimized open reading frame encoding the polypeptide of interest comprises a stop codon and the at least one microRNA binding site for a miR expressed in immune cells is located within the 3′ UTR at least 50 nucleotides after the stop codon. In other embodiments, the codon optimized open reading frame encoding the polypeptide of interest comprises a stop codon and the at least one microRNA binding site for a miR expressed in immune cells is located within the 3′ UTR immediately after the stop codon, or within the 3′ UTR 15-20 nucleotides after the stop codon or within the 3′ UTR 70-80 nucleotides after the stop codon. In other embodiments, the 3′ UTR comprises more than one miRNA binding site (e.g., 2-4 miRNA binding sites), wherein there can be a spacer region (e.g., of 10-100, 20-70 or 30-50 nucleotides in length) between each miRNA binding site. In another embodiment, the 3′ UTR comprises a spacer region between the end of the miRNA binding site(s) and the poly-A tail nucleotides. For example, a spacer region of 10-100, 20-70 or 30-50 nucleotides in length can be situated between the end of the miRNA binding site(s) and the beginning of the poly-A tail.

[0262] In one embodiment, a codon optimized open reading frame encoding a polypeptide of interest comprises a start codon and the at least one microRNA binding site is located within the 5′ UTR 1-100 nucleotides before (upstream of) the start codon. In one embodiment, the codon optimized open reading frame encoding the polypeptide of interest comprises a start codon and the at least one microRNA binding site for a miR expressed in immune cells is located within the 5′ UTR 10-50 nucleotides before (upstream of) the start codon. In another embodiment, the codon optimized open reading frame encoding the polypeptide of interest comprises a start codon and the at least one microRNA binding site for a miR expressed in immune cells is located within the 5′ UTR at least 25 nucleotides before (upstream of) the start codon. In other embodiments, the codon optimized open reading frame encoding the polypeptide of interest comprises a start codon and the at least one microRNA binding site for a miR expressed in immune cells is located within the 5′ UTR immediately before the start codon, or within the 5′ UTR 15-20 nucleotides before the start codon or within the 5′ UTR 70-80 nucleotides before the start codon. In other embodiments, the 5′ UTR comprises more than one miRNA binding site (e.g., 2-4 miRNA binding sites), wherein there can be a spacer region (e.g., of 10-100, 20-70 or 30-50 nucleotides in length) between each miRNA binding site.

[0263] In one embodiment, the 3′ UTR comprises more than one stop codon, wherein at least one miRNA binding site is positioned downstream of the stop codons. For example, a 3′ UTR can comprise 1, 2 or 3 stop codons. Non-limiting examples of triple stop codons that can be used include: UGAUAAUAG, UGAUAGUAA, UAAUGAUAG, UGAUAAUAA, UGAUAGUAG, UAAUGAUGA, UAAUAGUAG, UGAUGAUGA, UAAUAAUAA, and UAGUAGUAG. Within a 3′ UTR, for example, 1, 2, 3 or 4 miRNA binding sites, e.g., miR-142-3p binding sites, can be positioned immediately adjacent to the stop codon(s) or at any number of nucleotides downstream of the final stop codon. When the 3′ UTR comprises multiple miRNA binding sites, these binding sites can be positioned directly next to each other in the construct (i.e., one after the other) or, alternatively, spacer nucleotides can be positioned between each binding site.

[0264] In one embodiment, the 3′ UTR comprises three stop codons with a single miR-142-3p binding site located downstream of the 3rd stop codon. Non-limiting examples of sequences of 3′ UTR having three stop codons and a single miR-142-3p binding site located at different positions downstream of the final stop codon are shown in SEQ ID NOs:172, 183-185.

TABLE 4
5′UTRs, 3′UTRs, miR sequences, and miR binding sites

| SEQ ID | |
|---|---|
| NO: | Sequence |
| 154 | gcuggagccucgguggccaugcuucuugccccuugggccuccccccagccccuccuccccuuc |
| | cugcacccguacccccuccauaaaguaggaaacacuacaguggucuuugaauaaagucugagu |
| | gggcggc (3′ UTR with miR 142-3p binding site) |
| 146 | uccauaaaguaggaaacacuaca |
| | (miR 142-3p binding site) |
| 145 | uguaguguuuccuacuuuaugga |
| | (miR 142-3p sequence) |
| 147 | cauaaaguagaaagcacuacu |
| | (miR 142-5p sequence) |
| 155 | ccucugaaauucaguucuucag |
| | (miR 146-3p sequence) |
| 156 | ugagaacugaauuccauggguu |
| | (miR 146-5p sequence) |
| 157 | cuccuacauauuagcauuaaca |
| | (miR 155-3p sequence) |
| 158 | uuaaugcuaaucgugauaggggu |
| | (miR 155-5p sequence) |
| 150 | ucguaccgugaguaauaaugcg |
| | (miR 126-3p sequence) |
| 152 | cauuauuacuuuugguacgcg |
| | (miR 126-5p sequence) |
| 159 | ccaguauuaacugugcugcuga |
| | (miR 16-3p sequence) |
| 160 | uagcagcacguaaauauuggcg |
| | (miR 16-5p sequence) |
| 161 | caacaccagucgaugggcugu |
| | (miR 21-3p sequence) |
| 162 | uagcuuaucagacugauguuga |
| | (miR 21-5p sequence) |
| 163 | ugucaguuugucaaauacccca |
| | (miR 223-3p sequence) |
| 164 | cguguauuugacaagcugaguu |
| | (miR 223-5p sequence) |
| 165 | uggcucaguucagcaggaacag |
| | (miR 24-3p sequence) |
| 166 | ugccuacugagcugauaucagu |
| | (miR 24-5p sequence) |
| 167 | uucacaguggcuaaguuccgc |
| | (miR 27-3p sequence) |
| 168 | agggcuuagcugcuugugagca |
| | (miR 27-5p sequence) |
| 169 | CGCAUUAUUACUCACGGUACGA |
| | (miR 126-3p binding site) |
| 170 | UGAUAAUAGGCUGGAGCCUCGGUGGCCAUGCUUCUUGCCCCUUGGGCCUCCCCCCAGCCCCUC |
| | CUCCCCUUCCUGCACCCGUACCCCCCGCAUUAUUACUCACGGUACGAGUGGUCUUUGAAUAAA |
| | GUCUGAGUGGGCGGC |
| | (3′ UTR with miR 126-3p binding site) |
| 171 | UGAUAAUAGGCUGGAGCCUCGGUGGCCAUGCUUCUUGCCCCUUGGGCCUCCCCCCAGCCCCUC |
| | CUCCCCUUCCUGCACCCGUACCCCCGUGGUCUUUGAAUAAAGUCUGAGUGGGCGGC |
| | (3′ UTR, no miR binding sites) |
| 172 | UGAUAAUAGGCUGGAGCCUCGGUGGCCAUGCUUCUUGCCCCUUGGGCCUCCCCCCAGCCCCUC |
| | CUCCCCUUCCUGCACCCGUACCCCCUCCAUAAAGUAGGAAACACUACAGUGGUCUUUGAAUAA |
| | AGUCUGAGUGGGCGGC |
| | (3′ UTR with miR 142-3p binding site) |
| 173 | UGAUAAUAGUCCAUAAAGUAGGAAACACUACAGCUGGAGCCUCGGUGGCCAUGCUUCUUGCCC |
| | CUUGGGCCUCCCCCCAGCCCCUCCUCCCCUUCCUGCACCCGUACCCCCCGCAUUAUUACUCAC |
| | GGUACGAGUGGUCUUUGAAUAAAGUCUGAGUGGGCGGC |
| | (3′ UTR with miR 142-3p and miR 126-3p binding sites variant 1) |
| 174 | Uuaaugcuaauugugauaggggu |
| | (miR 155-5p sequence) |
| 175 | ACCCCUAUCACAAUUAGCAUUAA |
| | (miR 155-5p binding site) |
| 176 | UGAUAAUAGUCCAUAAAGUAGGAAACACUACAGCUGGAGCCUCGGUGGCCAUGCUUCUUGCCC |
| | CUUGGGCCUCCAUAAAGUAGGAAACACUACAUCCCCCCAGCCCCUCCUCCCCUUCCUGCACCC |
| | GUACCCCCUCCAUAAAGUAGGAAACACUACAGUGGUCUUUGAAUAAAGUCUGAGUGGGCGGC |
| | (3′ UTR with 3 miR 142-3p binding sites) |
| 177 | UGAUAAUAGGCUGGAGCCUCGGUGGCCAUGCUUCUUGCCCCUUGGGCCUCCCCCCAGCCCCUC |
| | CUCCCCUUCCUGCACCCGUACCCCCAGUAGUGCUUUCUACUUUAUGGUGGUCUUUGAAUAAAG |
| | UCUGAGUGGGCGGC |
| | (3′ UTR with miR 142-5p binding site) |
| 178 | UGAUAAUAGAGUAGUGCUUUCUACUUUAUGGCUGGAGCCUCGGUGGCCAUGCUUCUUGCCCCU |
| | UGGGCCAGUAGUGCUUUCUACUUUAUGUCCCCCCAGCCCCUCCUCCCCUUCCUGCACCCGUAC |
| | CCCCAGUAGUGCUUUCUACUUUAUGGUGGUCUUUGAAUAAAGUCUGAGUGGGCGGC |
| | (3′ UTR with 3 miR 142-5p binding sites) |
| 179 | UGAUAAUAGAGUAGUGCUUUCUACUUUAUGGCUGGAGCCUCGGUGGCCAUGCUUCUUGCCCCU |
| | UGGGCCUCCAUAAAGUAGGAAACACUACAUCCCCCCAGCCCCUCCUCCCCUUCCUGCACCCGU |
| | ACCCCCAGUAGUGCUUUCUACUUUAUGGUGGUCUUUGAAUAAAGUCUGAGUGGGCGGC |
| | (3′ UTR with 2 miR 142-5p binding sites and 1 miR 142-3p |
| | binding site) |
| 180 | UGAUAAUAGGCUGGAGCCUCGGUGGCCAUGCUUCUUGCCCCUUGGGCCUCCCCCCAGCCCCUC |
| | CUCCCCUUCCUGCACCCGUACCCCCACCCCUAUCACAAUUAGCAUUAAGUGGUCUUUGAAUAA |
| | AGUCUGAGUGGGCGGC |
| | (3′ UTR with miR 155-5p binding site) |
| 181 | UGAUAAUAGACCCCUAUCACAAUUAGCAUUAAGCUGGAGCCUCGGUGGCCAUGCUUCUUGCCC |
| | CUUGGGCCACCCCUAUCACAAUUAGCAUUAAUCCCCCCAGCCCCUCCUCCCCUUCCUGCACCC |
| | GUACCCCCACCCCUAUCACAAUUAGCAUUAAGUGGUCUUUGAAUAAAGUCUGAGUGGGCGGC |
| | (3′ UTR with 3 miR 155-5p binding sites) |
| 182 | UGAUAAUAGACCCCUAUCACAAUUAGCAUUAAGCUGGAGCCUCGGUGGCCAUGCUUCUUGCCC |
| | CUUGGGCCUCCAUAAAGUAGGAAACACUACAUCCCCCCAGCCCCUCCUCCCCUUCCUGCACCC |
| | GUACCCCCACCCCUAUCACAAUUAGCAUUAAGUGGUCUUUGAAUAAAGUCUGAGUGGGCGGC |
| | (3′ UTR with 2 miR 155-5p binding sites and 1 miR 142-3p |
| | binding site) |
| 183 | UGAUAAUAGUCCAUAAAGUAGGAAACACUACAGCUGGAGCCUCGGUGGCCAUGCUUCUUGCCC |
| | CUUGGGCCUCCCCCCAGCCCCUCCUCCCCUUCCUGCACCCGUACCCCCGUGGUCUUUGAAUAA |
| | AGUCUGAGUGGGCGGC |
| | (3′ UTR with miR 142-3p binding site, P1 insertion) |
| 184 | UGAUAAUAGGCUGGAGCCUCGGUGGCUCCAUAAAGUAGGAAACACUACACAUGCUUCUUGCCC |
| | CUUGGGCCUCCCCCCAGCCCCUCCUCCCCUUCCUGCACCCGUACCCCCGUGGUCUUUGAAUAA |
| | AGUCUGAGUGGGCGGC |
| | (3′ UTR with miR 142-3p binding site, P2 insertion) |
| 185 | UGAUAAUAGGCUGGAGCCUCGGUGGCCAUGCUUCUUGCCCCUUGGGCCUCCAUAAAGUAGGAA |
| | ACACUACAUCCCCCCAGCCCCUCCUCCCCUUCCUGCACCCGUACCCCCGUGGUCUUUGAAUAA |
| | AGUCUGAGUGGGCGGC |
| | (3′ UTR with miR 142-3p binding site, P3 insertion) |
| 148 | aguagugcuuucuacuuuaug |
| | (miR-142-5p binding site) |
| 144 | GACAGUGCAGUCACCCAUAAAGUAGAAAGCACUACUAACAGCACUGGAGGGUGUAGUGUUUCC |
| | UACUUUAUGGAUGAGUGUACUGUG |
| | (miR-142) |
| 186 | GGGAAAUAAGAGAGAAAAGAAGAGUAAGAAGAAAUAUAAGAGCCACC |
| | (5′ UTR) |
| 187 | GGGAAAUAAGAGUCCAUAAAGUAGGAAACACUACAAGAAAAGAAGAGUAAGAAGAAAUAUAAG |
| | AGCCACC |
| | (5′ UTR with miR142-3p binding site at position pl) |
| 188 | GGGAAAUAAGAGAGAAAAGAAGAGUAAUCCAUAAAGUAGGAAACACUACAGAAGAAAUAUAAG |
| | AGCCACC |
| | (5′ UTR with miR142-3p binding site at position p2) |
| 189 | GGGAAAUAAGAGAGAAAAGAAGAGUAAGAAGAAAUAUAAUCCAUAAAGUAGGAAACACUACAG |
| | AGCCACC |
| | (5′ UTR with miR142-3p binding site at position p3) |
| 175 | ACCCCUAUCACAAUUAGCAUUAA |
| | (miR 155-5p binding site) |
| 190 | UGAUAAUAGAGUAGUGCUUUCUACUUUAUGGCUGGAGCCUCGGUGGCCAUGCUUCUUGCCCCU |
| | UGGGCCAGUAGUGCUUUCUACUUUAUGUCCCCCCAGCCCCUCUCCCCUUCCUGCACCCGUACC |
| | CCCAGUAGUGCUUUCUACUUUAUGGUGGUCUUUGAAUAAAGUCUGAGUGGGCGGC |
| | (3′ UTR with 3 miR 142-5p binding sites) |
| 191 | UGAUAAUAGGCUGGAGCCUCGGUGGCCAUGCUUCUUGCCCCUUCCAUAAAGUAGGAAACACUA |
| | CAUGGGCCUCCCCCCAGCCCCUCCUCCCCUUCCUGCACCCGUACCCCCGUGGUCUUUGAAUAA |
| | AGUCUGAGUGGGCGGC |
| | (3′UTR including miR142-3p binding site) |
| 192 | UGAUAAUAGGCUGGAGCCUCGGUGGCCAUGCUUCUUGCCCCUUGGGCCUCCCCCCAGUCCAUA |
| | AAGUAGGAAACACUACACCCCUCCUCCCCUUCCUGCACCCGUACCCCCGUGGUCUUUGAAUAA |
| | AGUCUGAGUGGGCGGC |
| | (3′UTR including miR142-3p binding site) |
| 193 | UGAUAAUAGGCUGGAGCCUCGGUGGCCAUGCUUCUUGCCCCUUGGGCCUCCCCCCAGCCCCUC |
| | CUCCCCUUCUCCAUAAAGUAGGAAACACUACACUGCACCCGUACCCCCGUGGUCUUUGAAUAA |
| | AGUCUGAGUGGGCGGC |
| | (3′UTR including miR142-3p binding site) |
| 194 | UGAUAAUAGGCUGGAGCCUCGGUGGCCAUGCUUCUUGCCCCUUGGGCCUCCCCCCAGCCCCUC |
| | CUCCCCUUCCUGCACCCGUACCCCCGUGGUCUUUGAAUAAAGUUCCAUAAAGUAGGAAACACU |
| | ACACUGAGUGGGCGGC |
| | (3′UTR including miR142-3p binding site) |
| 195 | UGAUAAUAGUCCAUAAAGUAGGAAACACUACAGCUGGAGCCUCGGUGGCCUAGCUUCUUGCCC |
| | CUUGGGCCUCCCCCCAGCCCCUCCUCCCCUUCCUGCACCCGUACCCCCCGCAUUAUUACUCAC |
| | GGUACGAGUGGUCUUUGAAUAAAGUCUGAGUGGGCGGC |
| | (3′ UTR with miR 142-3p and miR 126-3p binding sites variant 2) |
| 196 | UGAUAAUAGGCUGGAGCCUCGGUGGCCUAGCUUCUUGCCCCUUGGGCCUCCCCCCAGCCCCUC |
| | CUCCCCUUCCUGCACCCGUACCCCCGUGGUCUUUGAAUAAAGUCUGAGUGGGCGGC |
| | (3′ UTR, no miR binding sites variant 2) |
| 197 | UGAUAAUAGGCUGGAGCCUCGGUGGCCUAGCUUCUUGCCCCUUGGGCCUCCCCCCAGCCCCUC |
| | CUCCCCUUCCUGCACCCGUACCCCCUCCAUAAAGUAGGAAACACUACAGUGGUCUUUGAAUAA |
| | AGUCUGAGUGGGCGGC |
| | (3′ UTR with miR 142-3p binding site variant 3) |
| 198 | UGAUAAUAGGCUGGAGCCUCGGUGGCCUAGCUUCUUGCCCCUUGGGCCUCCCCCCAGCCCCUC |
| | CUCCCCUUCCUGCACCCGUACCCCCCGCAUUAUUACUCACGGUACGAGUGGUCUUUGAAUAAA |
| | GUCUGAGUGGGCGGC |
| | (3′ UTR with miR 126-3p binding site variant 3) |
| 199 | UGAUAAUAGUCCAUAAAGUAGGAAACACUACAGCUGGAGCCUCGGUGGCCUAGCUUCUUGCCC |
| | CUUGGGCCUCCAUAAAGUAGGAAACACUACAUCCCCCCAGCCCCUCCUCCCCUUCCUGCACCC |
| | GUACCCCCUCCAUAAAGUAGGAAACACUACAGUGGUCUUUGAAUAAAGUCUGAGUGGGCGGC |
| | (3′ UTR with 3 miR 142-3p binding sites variant 2) |
| 200 | UGAUAAUAGUCCAUAAAGUAGGAAACACUACAGCUGGAGCCUCGGUGGCCUAGCUUCUUGCCC |
| | CUUGGGCCUCCCCCCAGCCCCUCCUCCCCUUCCUGCACCCGUACCCCCGUGGUCUUUGAAUAA |
| | AGUCUGAGUGGGCGGC |
| | (3′UTR with miR 142-3p binding site, P1 insertion variant 2) |
| 201 | UGAUAAUAGGCUGGAGCCUCGGUGGCUCCAUAAAGUAGGAAACACUACACUAGCUUCUUGCCC |
| | CUUGGGCCUCCCCCCAGCCCCUCCUCCCCUUCCUGCACCCGUACCCCCGUGGUCUUUGAAUAA |
| | AGUCUGAGUGGGCGGC |
| | (3′UTR with miR 142-3p binding site, P2 insertion variant 2) |
| 202 | UGAUAAUAGGCUGGAGCCUCGGUGGCCUAGCUUCUUGCCCCUUGGGCCUCCAUAAAGUAGGAA |
| | ACACUACAUCCCCCCAGCCCCUCCUCCCCUUCCUGCACCCGUACCCCCGUGGUCUUUGAAUAA |
| | AGUCUGAGUGGGCGGC |
| | (3′UTR with miR 142-3p binding site, P3 insertion variant 2) |
| 203 | UGAUAAUAGGCUGGAGCCUCGGUGGCCUAGCUUCUUGCCCCUUGGGCCUCCCCCCAGCCCCUC |
| | CUCCCCUUCCUGCACCCGUACCCCCACCCCUAUCACAAUUAGCAUUAAGUGGUCUUUGAAUAA |
| | AGUCUGAGUGGGCGGC |
| | (3′UTR with miR 155-5p binding site variant 2) |
| 204 | UGAUAAUAGACCCCUAUCACAAUUAGCAUUAAGCUGGAGCCUCGGUGGCCUAGCUUCUUGCCC |
| | CUUGGGCCACCCCUAUCACAAUUAGCAUUAAUCCCCCCAGCCCCUCCUCCCCUUCCUGCACCC |
| | GUACCCCCACCCCUAUCACAAUUAGCAUUAAGUGGUCUUUGAAUAAAGUCUGAGUGGGCGGC |
| | (3′ UTR with 3 miR 155-5p binding sites variant 2) |
| 205 | UGAUAAUAGACCCCUAUCACAAUUAGCAUUAAGCUGGAGCCUCGGUGGCCUAGCUUCUUGCCC |
| | CUUGGGCCUCCAUAAAGUAGGAAACACUACAUCCCCCCAGCCCCUCCUCCCCUUCCUGCACCC |
| | GUACCCCCACCCCUAUCACAAUUAGCAUUAAGUGGUCUUUGAAUAAAGUCUGAGUGGGCGGC |
| | (3′UTR with 2 miR 155-5p binding sites and 1 miR 142-3p binding |
| | site variant 2) |

Stop codon = bold
miR 142-3p binding site = underline
miR 126-3p binding site = bold underline
miR 155-5p binding site = shaded
miR 142-5p binding site = shaded and bold underline

[0265] In one embodiment, the polynucleotide of the invention comprises a 5′ UTR, a codon optimized open reading frame encoding a polypeptide of interest, a 3′ UTR comprising the at least one miRNA binding site for a miR expressed in immune cells, and a 3′ tailing region of linked nucleosides. In various embodiments, the 3′ UTR comprises 1-4, at least two, one, two, three or four miRNA binding sites for miRs expressed in immune cells, preferably abundantly or preferentially expressed in immune cells.

[0266] In one embodiment, the at least one miRNA expressed in immune cells is a miR-142-3p microRNA binding site. In one embodiment, the miR-142-3p microRNA binding site comprises the sequence shown in SEQ ID NO:145. In one embodiment, the 3′ UTR of the mRNA comprising the miR-142-3p microRNA binding site comprises the sequence shown in SEQ ID NO:146.

[0267] In one embodiment, the at least one miRNA expressed in immune cells is a miR-126 microRNA binding site. In one embodiment, the miR-126 binding site is a miR-126-3p binding site. In one embodiment, the miR-126-3p microRNA binding site comprises the sequence shown in SEQ ID NO:169. In one embodiment, the 3′ UTR of the mRNA of the invention comprising the miR-126-3p microRNA binding site comprises the sequence shown in SEQ ID NO:151.

[0268] Non-limiting exemplary sequences for miRs to which a microRNA binding site(s) of the disclosure can bind include the following: miR-142-3p (SEQ ID NO:145), miR-142-5p (SEQ ID NO:147), miR-146-3p (SEQ ID NO:155), miR-146-5p (SEQ ID NO:156), miR-155-3p (SEQ ID NO:157), miR-155-5p (SEQ ID NO:158), miR-126-3p (SEQ ID NO:150), miR-126-5p (SEQ ID NO:152), miR-16-3p (SEQ ID NO:159), miR-16-5p (SEQ ID NO:160), miR-21-3p (SEQ ID NO:161), miR-21-5p (SEQ ID NO:162), miR-223-3p (SEQ ID NO:163), miR-223-5p (SEQ ID NO:164), miR-24-3p (SEQ ID NO:165), miR-24-5p (SEQ ID NO:166), miR-27-3p (SEQ ID NO:167) and miR-27-5p (SEQ ID NO:168). Other suitable miR sequences expressed in immune cells (e.g., abundantly or preferentially expressed in immune cells) are known and available in the art, for example at the University of Manchester's microRNA database, miRBase. Sites that bind any of the aforementioned miRs can be designed based on Watson-Crick complementarity to the miR, typically 100% complementarity to the miR, and inserted into an mRNA construct of the disclosure as described herein.

[0269] In another embodiment, a polynucleotide of the present invention (e.g., and mRNA, e.g., the 3′ UTR thereof) can comprise at least one miRNA bindingsite to thereby reduce or inhibit accelerated blood clearance, for example by reducing or inhibiting production of IgMs, e.g., against PEG, by B cells and/or reducing or inhibiting proliferation and/or activation of pDCs, and can comprise at least one miRNA bindingsite for modulating tissue expression of an encoded protein of interest.

[0270] miRNA gene regulation can be influenced by the sequence surrounding the miRNA such as, but not limited to, the species of the surrounding sequence, the type of sequence (e.g., heterologous, homologous, exogenous, endogenous, or artificial), regulatory elements in the surrounding sequence and/or structural elements in the surrounding sequence. The miRNA can be influenced by the 5′UTR and/or 3′UTR. As a non-limiting example, a non-human 3′UTR can increase the regulatory effect of the miRNA sequence on the expression of a polypeptide of interest compared to a human 3′ UTR of the same sequence type.

[0271] In one embodiment, other regulatory elements and/or structural elements of the 5′ UTR can influence miRNA mediated gene regulation. One example of a regulatory element and/or structural element is a structured IRES (Internal Ribosome Entry Site) in the 5′ UTR, which is necessary for the binding of translational elongation factors to initiate protein translation. EIF4A2 binding to this secondarily structured element in the 5′-UTR is necessary for miRNA mediated gene expression (Meijer HA et al., Science, 2013, 340, 82-85, herein incorporated by reference in its entirety). The polynucleotides of the invention can further include this structured 5′ UTR in order to enhance microRNA mediated gene regulation.

[0272] At least one miRNA binding site can be engineered into the 3′ UTR of a polynucleotide of the invention. In this context, at least two, at least three, at least four, at least five, at least six, at least seven, at least eight, at least nine, at least ten, or more miRNA binding sites can be engineered into a 3′ UTR of a polynucleotide of the invention. For example, 1 to 10, 1 to 9, 1 to 8, 1 to 7, 1 to 6, 1 to 5, 1 to 4, 1 to 3, 2, or 1 miRNA binding sites can be engineered into the 3′UTR of a polynucleotide of the invention. In one embodiment, miRNA binding sites incorporated into a polynucleotide of the invention can be the same or can be different miRNA sites. A combination of different miRNA binding sites incorporated into a polynucleotide of the invention can include combinations in which more than one copy of any of the different miRNA sites are incorporated. In another embodiment, miRNA binding sites incorporated into a polynucleotide of the invention can target the same or different tissues in the body. As a non-limiting example, through the introduction of tissue-, cell-type-, or disease-specific miRNA binding sites in the 3′-UTR of a polynucleotide of the invention, the degree of expression in specific cell types (e.g., myeloid cells, endothelial cells, etc.) can be reduced.

[0273] In one embodiment, a miRNA binding site can be engineered near the 5′ terminus of the 3′UTR, about halfway between the 5′ terminus and 3′ terminus of the 3′UTR and/or near the 3′ terminus of the 3′ UTR in a polynucleotide of the invention. As a non-limiting example, a miRNA binding site can be engineered near the 5′ terminus of the 3′UTR and about halfway between the 5′ terminus and 3′ terminus of the 3′UTR. As another non-limiting example, a miRNA binding site can be engineered near the 3′ terminus of the 3′UTR and about halfway between the 5′ terminus and 3′ terminus of the 3′ UTR. As yet another non-limiting example, a miRNA binding site can be engineered near the 5′ terminus of the 3′ UTR and near the 3′ terminus of the 3′ UTR.

[0274] In another embodiment, a 3′UTR can comprise 1, 2, 3, 4, 5, 6, 7, 8, 9, or 10 miRNA binding sites. The miRNA binding sites can be complementary to a miRNA, miRNA seed sequence, and/or miRNA sequences flanking the seed sequence.

[0275] In some embodiments, the expression of a polynucleotide of the invention can be controlled by incorporating at least one sensor sequence in the polynucleotide and formulating the polynucleotide for administration. As a non-limiting example, a polynucleotide of the invention can be targeted to a tissue or cell by incorporating a miRNA binding site and formulating the polynucleotide in a lipid nanoparticle comprising an ionizable lipid, including any of the lipids described herein.

[0276] A polynucleotide of the invention can be engineered for more targeted expression in specific tissues, cell types, or biological conditions based on the expression patterns of miRNAs in the different tissues, cell types, or biological conditions. Through introduction of tissue-specific miRNA binding sites, a polynucleotide of the invention can be designed for optimal protein expression in a tissue or cell, or in the context of a biological condition.

[0277] In some embodiments, a polynucleotide of the invention can be designed to incorporate miRNA binding sites that either have 100% identity to known miRNA seed sequences or have less than 100% identity to miRNA seed sequences. In some embodiments, a polynucleotide of the invention can be designed to incorporate miRNA binding sites that have at least: 60%, 65%, 70%, 75%, 80%, 85%, 90%, 95%, 96%, 97%, 98%, or 99% identity to known miRNA seed sequences. The miRNA seed sequence can be partially mutated to decrease miRNA binding affinity and as such result in reduced downmodulation of the polynucleotide. In essence, the degree of match or mismatch between the miRNA binding site and the miRNA seed can act as a rheostat to more finely tune the ability of the miRNA to modulate protein expression. In addition, mutation in the non-seed region of a miRNA binding site can also impact the ability of a miRNA to modulate protein expression.

[0278] In one embodiment, a miRNA sequence can be incorporated into the loop of a stem loop.

[0279] In another embodiment, a miRNA seed sequence can be incorporated in the loop of a stem loop and a miRNA binding site can be incorporated into the 5′ or 3′ stem of the stem loop.

[0280] In one embodiment the miRNA sequence in the 5′ UTR can be used to stabilize a polynucleotide of the invention described herein.

[0281] In another embodiment, a miRNA sequence in the 5′ UTR of a polynucleotide of the invention can be used to decrease the accessibility of the site of translation initiation such as, but not limited to a start codon. See, e.g., Matsuda et al., PLoS One. 2010 11(5):e15057; incorporated herein by reference in its entirety, which used antisense locked nucleic acid (LNA) oligonucleotides and exon-junction complexes (EJCs) around a start codon (-4 to +37 where the A of the AUG codons is +1) in order to decrease the accessibility to the first start codon (AUG). Matsuda showed that altering the sequence around the start codon with an LNA or EJC affected the efficiency, length and structural stability of a polynucleotide. A polynucleotide of the invention can comprise a miRNA sequence, instead of the LNA or EJC sequence described by Matsuda et al, near the site of translation initiation in order to decrease the accessibility to the site of translation initiation. The site of translation initiation can be prior to, after or within the miRNA sequence. As a non-limiting example, the site of translation initiation can be located within a miRNA sequence such as a seed sequence or binding site.

[0282] In some embodiments, a polynucleotide of the invention can include at least one miRNA in order to dampen the antigen presentation by antigen presenting cells. The miRNA can be the complete miRNA sequence, the miRNA seed sequence, the miRNA sequence without the seed, or a combination thereof. As a non-limiting example, a miRNA incorporated into a polynucleotide of the invention can be specific to the hematopoietic system. As another non-limiting example, a miRNA incorporated into a polynucleotide of the invention to dampen antigen presentation is miR-142-3p.

[0283] In some embodiments, a polynucleotide of the invention can include at least one miRNA in order to dampen expression of the encoded polypeptide in a tissue or cell of interest. As a non-limiting example a polynucleotide of the invention can include at least one miR-142-3p binding site, miR-142-3p seed sequence, miR-142-3p binding site without the seed, miR-142-5p binding site, miR-142-5p seed sequence, miR-142-5p binding site without the seed, miR-146 binding site, miR-146 seed sequence and/or miR-146 binding site without the seed sequence.

[0284] In some embodiments, a polynucleotide of the invention can comprise at least one miRNA binding site in the 3′UTR in order to selectively degrade mRNA therapeutics in the immune cells to subdue unwanted immunogenic reactions caused by therapeutic delivery. As a non-limiting example, the miRNA binding site can make a polynucleotide of the invention more unstable in antigen presenting cells. Non-limiting examples of these miRNAs include miR-142-5p, miR-142-3p, miR-146a-5p, and miR-146-3p.

[0285] In one embodiment, a polynucleotide of the invention comprises at least one miRNA sequence in a region of the polynucleotide that can interact with a RNA binding protein. In some embodiments, the polynucleotide of the invention (e.g., a RNA, e.g., an mRNA) comprising (i) a sequence-optimized nucleotide sequence (e.g., an ORF) encoding an ABCB4, ABCB11, or ATP8B1 polypeptide (e.g., the wild-type sequence, functional fragment, or variant thereof) and (ii) a miRNA binding site (e.g., a miRNA binding site that binds to miR-142) and/or a miRNA binding site that binds to miR-126.

### 3′ UTRs

[0286] In certain embodiments, a polynucleotide of the present invention (e.g., a polynucleotide comprising a nucleotide sequence encoding an ABCB4, ABCB11, or ATP8B1 polypeptide of the invention) further comprises a 3′ UTR.

[0287] 3′-UTR is the section of mRNA that immediately follows the translation termination codon and often contains regulatory regions that post-transcriptionally influence gene expression. Regulatory regions within the 3′-UTR can influence polyadenylation, translation efficiency, localization, and stability of the mRNA. In one embodiment, the 3′-UTR useful for the invention comprises a binding site for regulatory proteins or microRNAs.

[0288] In certain embodiments, the 3′ UTR useful for the polynucleotides of the invention comprises a 3′ UTR selected from the group consisting of SEQ ID NO: 13, 154, 170-173, 176-185, 190-222, or any combination thereof. In some embodiments, the 3′ UTR selected from the group consisting of SEQ ID NO: 13, 206-222, or any combination thereof. In some embodiments, the 3′ UTR comprises a nucleic acid sequence of SEQ ID NO:13. In some embodiments, the 3′ UTR comprises a nucleic acid sequence of SEQ ID NO:206. In some embodiments, the 3′ UTR comprises a nucleic acid sequences of SEQ ID NO:207. In some embodiments, the 3′ UTR comprises a nucleic acid sequences of SEQ ID NO:208. In some embodiments, the 3′ UTR comprises a nucleic acid sequences of SEQ ID NO:209. In some embodiments, the 3′ UTR comprises a nucleic acid sequences of SEQ ID NO:210. In some embodiments, the 3′ UTR comprises a nucleic acid sequences of SEQ ID NO:211. In some embodiments, the 3′ UTR comprises a nucleic acid sequences of SEQ ID NO:212. In some embodiments, the 3′ UTR comprises a nucleic acid sequences of SEQ ID NO:213. In some embodiments, the 3′ UTR comprises a nucleic acid sequences of SEQ ID NO:214. In some embodiments, the 3′ UTR comprises a nucleic acid sequences of SEQ ID NO:215. In some embodiments, the 3′ UTR comprises a nucleic acid sequences of SEQ ID NO:216. In some embodiments, the 3′ UTR comprises a nucleic acid sequences of SEQ ID NO:217. In some embodiments, the 3′ UTR comprises a nucleic acid sequences of SEQ ID NO:218. In some embodiments, the 3′ UTR comprises a nucleic acid sequences of SEQ ID NO:219. In some embodiments, the 3′ UTR comprises a nucleic acid sequences of SEQ ID NO:220. In some embodiments, the 3′ UTR comprises a nucleic acid sequences of SEQ ID NO:221. In some embodiments, the 3′ UTR comprises a nucleic acid sequences of SEQ ID NO:222.

[0289] In certain embodiments, the 3′ UTR sequence useful for the invention comprises a nucleotide sequence at least about 60%, at least about 70%, at least about 80%, at least about 90%, at least about 95%, at least about 96%, at least about 97%, at least about 98%, at least about 99%, or about 100% identical to a sequence selected from the group consisting of 3′ UTR sequences selected from the group consisting of SEQ ID NOs: 13, 154, 170-173, 176-185, 190-222, or any combination thereof.

Regions having a 5′ Cap

[0290] The disclosure also includes a polynucleotide that comprises both a 5′ Cap and a polynucleotide of the present invention (e.g., a polynucleotide comprising a nucleotide sequence encoding an ABCB4, ABCB11, or ATP8B1 polypeptide).

[0291] The 5′ cap structure of a natural mRNA is involved in nuclear export, increasing mRNA stability and binds the mRNA Cap Binding Protein (CBP), which is responsible for mRNA stability in the cell and translation competency through the association of CBP with poly-A binding protein to form the mature cyclic mRNA species. The cap further assists the removal of 5′ proximal introns during mRNA splicing.

[0292] Endogenous mRNA molecules can be 5′-end capped generating a 5′-ppp-5′-triphosphate linkage between a terminal guanosine cap residue and the 5′-terminal transcribed sense nucleotide of the mRNA molecule. This 5′-guanylate cap can then be methylated to generate an N7-methyl-guanylate residue. The ribose sugars of the terminal and/or anteterminal transcribed nucleotides of the 5′ end of the mRNA can optionally also be 2′-O-methylated. 5′-decapping through hydrolysis and cleavage of the guanylate cap structure can target a nucleic acid molecule, such as an mRNA molecule, for degradation.

[0293] In some embodiments, the polynucleotides of the present invention (e.g., a polynucleotide comprising a nucleotide sequence encoding an ABCB4, ABCB11, or ATP8B1 polypeptide) incorporate a cap moiety.

[0294] In some embodiments, polynucleotides of the present invention (e.g., a polynucleotide comprising a nucleotide sequence encoding an ABCB4, ABCB11, or ATP8B1 polypeptide) comprise a non-hydrolyzable cap structure preventing decapping and thus increasing mRNA half-life. Because cap structure hydrolysis requires cleavage of 5′-ppp-5′ phosphorodiester linkages, modified nucleotides can be used during the capping reaction. For example, a Vaccinia Capping Enzyme from New England Biolabs (Ipswich, Mass.) can be used with α-thio-guanosine nucleotides according to the manufacturer's instructions to create a phosphorothioate linkage in the 5′-ppp-5′ cap. Additional modified guanosine nucleotides can be used such as a-methyl-phosphonate and seleno-phosphate nucleotides.

[0295] Additional modifications include, but are not limited to, 2′-O-methylation of the ribose sugars of 5′-terminal and/or 5′-anteterminal nucleotides of the polynucleotide (as mentioned above) on the 2′-hydroxyl group of the sugar ring. Multiple distinct 5′-cap structures can be used to generate the 5′-cap of a nucleic acid molecule, such as a polynucleotide that functions as an mRNA molecule. Cap analogs, which herein are also referred to as synthetic cap analogs, chemical caps, chemical cap analogs, or structural or functional cap analogs, differ from natural (i.e., endogenous, wild-type or physiological) 5′-caps in their chemical structure, while retaining cap function. Cap analogs can be chemically (i.e., non-enzymatically) or enzymatically synthesized and/or linked to the polynucleotides of the invention.

[0296] For example, the Anti-Reverse Cap Analog (ARCA) cap contains two guanines linked by a 5′-5′-triphosphate group, wherein one guanine contains an N7 methyl group as well as a 3′-O-methyl group (i.e., N7,3′-O-dimethyl-guanosine-5′-triphosphate-5′-guanosine (m⁷G-3′mppp-G; which can equivalently be designated 3′ O-Me-m7G(5′)ppp(5′)G). The 3′-O atom of the other, unmodified, guanine becomes linked to the 5′-terminal nucleotide of the capped polynucleotide. The N7- and 3′-O-methlyated guanine provides the terminal moiety of the capped polynucleotide.

[0297] Another exemplary cap is mCAP, which is similar to ARCA but has a 2′-O-methyl group on guanosine (i.e., N7,2′-O-dimethyl-guanosine-5′-triphosphate-5′-guanosine, m⁷Gm-PPP-G).

[0298] In some embodiments, the cap is a dinucleotide cap analog. As a non-limiting example, the dinucleotide cap analog can be modified at different phosphate positions with a boranophosphate group or a phosphoroselenoate group such as the dinucleotide cap analogs described in U.S. Pat. No. 8,519,110, the contents of which are herein incorporated by reference in its entirety.

[0299] In another embodiment, the cap is a cap analog is a N7-(4-chlorophenoxyethyl) substituted dinucleotide form of a cap analog known in the art and/or described herein. Non-limiting examples of a N7-(4-chlorophenoxyethyl) substituted dinucleotide form of a cap analog include a N7-(4-chlorophenoxyethyl)-G(5′)ppp(5′)G and a N7-(4-chlorophenoxyethyl)-m^{3′-O}G(5¹)ppp(5′)G cap analog (See, e.g., the various cap analogs and the methods of synthesizing cap analogs described in Kore et al. Bioorganic & Medicinal Chemistry 2013 21:4570-4574; the contents of which are herein incorporated by reference in its entirety). In another embodiment, a cap analog of the present invention is a 4-chloro/bromophenoxyethyl analog.

[0300] While cap analogs allow for the concomitant capping of a polynucleotide or a region thereof, in an in vitro transcription reaction, up to 20% of transcripts can remain uncapped. This, as well as the structural differences of a cap analog from an endogenous 5′-cap structures of nucleic acids produced by the endogenous, cellular transcription machinery, can lead to reduced translational competency and reduced cellular stability.

[0301] Polynucleotides of the invention (e.g., a polynucleotide comprising a nucleotide sequence encoding an ABCB4, ABCB11, or ATP8B1 polypeptide) can also be capped post-manufacture (whether IVT or chemical synthesis), using enzymes, in order to generate more authentic 5′-cap structures. As used herein, the phrase “more authentic” refers to a feature that closely mirrors or mimics, either structurally or functionally, an endogenous or wild type feature. That is, a “more authentic” feature is better representative of an endogenous, wild-type, natural or physiological cellular function and/or structure as compared to synthetic features or analogs, etc., of the prior art, or which outperforms the corresponding endogenous, wild-type, natural or physiological feature in one or more respects. Non-limiting examples of more authentic 5′cap structures of the present invention are those that, among other things, have enhanced binding of cap binding proteins, increased half-life, reduced susceptibility to 5′ endonucleases and/or reduced 5′decapping, as compared to synthetic 5′cap structures known in the art (or to a wild-type, natural or physiological 5′cap structure). For example, recombinant Vaccinia Virus Capping Enzyme and recombinant 2′-O-methyltransferase enzyme can create a canonical 5′-5′-triphosphate linkage between the 5′-terminal nucleotide of a polynucleotide and a guanine cap nucleotide wherein the cap guanine contains an N7 methylation and the 5′-terminal nucleotide of the mRNA contains a 2′-O-methyl. Such a structure is termed the Cap1 structure. This cap results in a higher translational-competency and cellular stability and a reduced activation of cellular pro-inflammatory cytokines, as compared, e.g., to other 5′cap analog structures known in the art. Cap structures include, but are not limited to, 7mG(5′)ppp(5′)N,pN2p (cap 0), 7mG(5′)ppp(5′)NlmpNp (cap 1), and 7mG(5′)-ppp(5′)NlmpN2mp (cap 2).

[0302] As a non-limiting example, capping chimeric polynucleotides post-manufacture can be more efficient as nearly 100% of the chimeric polynucleotides can be capped. This is in contrast to ˜80% when a cap analog is linked to a chimeric polynucleotide in the course of an in vitro transcription reaction.

[0303] According to the present invention, 5′ terminal caps can include endogenous caps or cap analogs. According to the present invention, a 5′ terminal cap can comprise a guanine analog. Useful guanine analogs include, but are not limited to, inosine, N1-methyl-guanosine, 2′fluoro-guanosine, 7-deaza-guanosine, 8-oxo-guanosine, 2-amino-guanosine, LNA-guanosine, and 2-azido-guanosine.

### Poly-A Tails

[0304] In some embodiments, the polynucleotides of the present disclosure (e.g., a polynucleotide comprising a nucleotide sequence encoding an ABCB4, ABCB11, or ATP8B1 polypeptide) further comprise a poly-A tail. In further embodiments, terminal groups on the poly-A tail can be incorporated for stabilization. In other embodiments, a poly-A tail comprises des-3′ hydroxyl tails.

[0305] During RNA processing, a long chain of adenine nucleotides (poly-A tail) can be added to a polynucleotide such as an mRNA molecule in order to increase stability. Immediately after transcription, the 3′ end of the transcript can be cleaved to free a 3′ hydroxyl. Then poly-A polymerase adds a chain of adenine nucleotides to the RNA. The process, called polyadenylation, adds a poly-A tail that can be between, for example, approximately 80 to approximately 250 residues long, including approximately 80, 90, 100, 110, 120, 130, 140, 150, 160, 170, 180, 190, 200, 210, 220, 230, 240 or 250 residues long. In one embodiment, the poly-A tail is 100 nucleotides in length.

[0306] Poly-A tails can also be added after the construct is exported from the nucleus.

[0307] According to the present invention, terminal groups on the poly-A tail can be incorporated for stabilization. Polynucleotides of the present invention can include des-3′ hydroxyl tails. They can also include structural moieties or 2′-Omethyl modifications as taught by Junjie Li, et al. (Current Biology, Vol. 15, 1501-1507, Aug. 23, 2005, the contents of which are incorporated herein by reference in its entirety).

[0308] The polynucleotides of the present invention can be designed to encode transcripts with alternative poly-A tail structures including histone mRNA. According to Norbury, “Terminal uridylation has also been detected on human replication-dependent histone mRNAs. The turnover of these mRNAs is thought to be important for the prevention of potentially toxic histone accumulation following the completion or inhibition of chromosomal DNA replication. These mRNAs are distinguished by their lack of a 3′ poly-A tail, the function of which is instead assumed by a stable stem-loop structure and its cognate stem-loop binding protein (SLBP); the latter carries out the same functions as those of PABP on polyadenylated mRNAs” (Norbury, “Cytoplasmic RNA: a case of the tail wagging the dog,” Nature Reviews Molecular Cell Biology; AOP, published online 29 Aug. 2013; doi:10.1038/nrm3645) the contents of which are incorporated herein by reference in its entirety.

[0309] Unique poly-A tail lengths provide certain advantages to the polynucleotides of the present invention. Generally, the length of a poly-A tail, when present, is greater than 30 nucleotides in length. In another embodiment, the poly-A tail is greater than 35 nucleotides in length (e.g., at least or greater than about 35, 40, 45, 50, 55, 60, 70, 80, 90, 100, 120, 140, 160, 180, 200, 250, 300, 350, 400, 450, 500, 600, 700, 800, 900, 1,000, 1,100, 1,200, 1,300, 1,400, 1,500, 1,600, 1,700, 1,800, 1,900, 2,000, 2,500, and 3,000 nucleotides).

[0310] In some embodiments, the polynucleotide or region thereof includes from about 30 to about 3,000 nucleotides (e.g., from 30 to 50, from 30 to 100, from 30 to 250, from 30 to 500, from 30 to 750, from 30 to 1,000, from 30 to 1,500, from 30 to 2,000, from 30 to 2,500, from 50 to 100, from 50 to 250, from 50 to 500, from 50 to 750, from 50 to 1,000, from 50 to 1,500, from 50 to 2,000, from 50 to 2,500, from 50 to 3,000, from 100 to 500, from 100 to 750, from 100 to 1,000, from 100 to 1,500, from 100 to 2,000, from 100 to 2,500, from 100 to 3,000, from 500 to 750, from 500 to 1,000, from 500 to 1,500, from 500 to 2,000, from 500 to 2,500, from 500 to 3,000, from 1,000 to 1,500, from 1,000 to 2,000, from 1,000 to 2,500, from 1,000 to 3,000, from 1,500 to 2,000, from 1,500 to 2,500, from 1,500 to 3,000, from 2,000 to 3,000, from 2,000 to 2,500, and from 2,500 to 3,000).

[0311] In some embodiments, the poly-A tail is designed relative to the length of the overall polynucleotide or the length of a particular region of the polynucleotide. This design can be based on the length of a coding region, the length of a particular feature or region or based on the length of the ultimate product expressed from the polynucleotides.

[0312] In this context, the poly-A tail can be 10, 20, 30, 40, 50, 60, 70, 80, 90, or 100% greater in length than the polynucleotide or feature thereof. The poly-A tail can also be designed as a fraction of the polynucleotides to which it belongs. In this context, the poly-A tail can be 10, 20, 30, 40, 50, 60, 70, 80, or 90% or more of the total length of the construct, a construct region or the total length of the construct minus the poly-A tail. Further, engineered binding sites and conjugation of polynucleotides for Poly-A binding protein can enhance expression.

[0313] Additionally, multiple distinct polynucleotides can be linked together via the PABP (Poly-A binding protein) through the 3′-end using modified nucleotides at the 3′-terminus of the poly-A tail. Transfection experiments can be conducted in relevant cell lines at and protein production can be assayed by ELISA at 12 hr, 24 hr, 48 hr, 72 hr and day 7 post-transfection.

[0314] In some embodiments, the polynucleotides of the present invention are designed to include a poly-A-G Quartet region. The G-quartet is a cyclic hydrogen bonded array of four guanine nucleotides that can be formed by G-rich sequences in both DNA and RNA. In this embodiment, the G-quartet is incorporated at the end of the poly-A tail. The resultant polynucleotide is assayed for stability, protein production and other parameters including half-life at various time points. It has been discovered that the poly-A-G quartet results in protein production from an mRNA equivalent to at least 75% of that seen using a poly-A tail of 120 nucleotides alone.

### Start Codon Region

[0315] The invention also includes a polynucleotide that comprises both a start codon region and the polynucleotide described herein (e.g., a polynucleotide comprising a nucleotide sequence encoding an ABCB4, ABCB11, or ATP8B1 polypeptide). In some embodiments, the polynucleotides of the present invention can have regions that are analogous to or function like a start codon region.

[0316] In some embodiments, the translation of a polynucleotide can initiate on a codon that is not the start codon AUG. Translation of the polynucleotide can initiate on an alternative start codon such as, but not limited to, ACG, AGG, AAG, CTG/CUG, GTG/GUG, ATA/AUA, ATT/AUU, TTG/UUG (see Touriol et al. Biology of the Cell 95 (2003) 169-178 and Matsuda and Mauro PLoS ONE, 2010 5:11; the contents of each of which are herein incorporated by reference in its entirety).

[0317] As a non-limiting example, the translation of a polynucleotide begins on the alternative start codon ACG. As another non-limiting example, polynucleotide translation begins on the alternative start codon CTG or CUG. As yet another non-limiting example, the translation of a polynucleotide begins on the alternative start codon GTG or GUG.

[0318] Nucleotides flanking a codon that initiates translation such as, but not limited to, a start codon or an alternative start codon, are known to affect the translation efficiency, the length and/or the structure of the polynucleotide. (See, e.g., Matsuda and Mauro PLoS ONE, 2010 5:11; the contents of which are herein incorporated by reference in its entirety). Masking any of the nucleotides flanking a codon that initiates translation can be used to alter the position of translation initiation, translation efficiency, length and/or structure of a polynucleotide.

[0319] In some embodiments, a masking agent can be used near the start codon or alternative start codon in order to mask or hide the codon to reduce the probability of translation initiation at the masked start codon or alternative start codon. Non-limiting examples of masking agents include antisense locked nucleic acids (LNA) polynucleotides and exon-junction complexes (EJCs) (See, e.g., Matsuda and Mauro describing masking agents LNA polynucleotides and EJCs (PLoS ONE, 2010 5:11); the contents of which are herein incorporated by reference in its entirety).

[0320] In another embodiment, a masking agent can be used to mask a start codon of a polynucleotide in order to increase the likelihood that translation will initiate on an alternative start codon. In some embodiments, a masking agent can be used to mask a first start codon or alternative start codon in order to increase the chance that translation will initiate on a start codon or alternative start codon downstream to the masked start codon or alternative start codon.

[0321] In some embodiments, a start codon or alternative start codon can be located within a perfect complement for a miRNA binding site. The perfect complement of a miRNA binding site can help control the translation, length and/or structure of the polynucleotide similar to a masking agent. As a non-limiting example, the start codon or alternative start codon can be located in the middle of a perfect complement for a miRNA binding site. The start codon or alternative start codon can be located after the first nucleotide, second nucleotide, third nucleotide, fourth nucleotide, fifth nucleotide, sixth nucleotide, seventh nucleotide, eighth nucleotide, ninth nucleotide, tenth nucleotide, eleventh nucleotide, twelfth nucleotide, thirteenth nucleotide, fourteenth nucleotide, fifteenth nucleotide, sixteenth nucleotide, seventeenth nucleotide, eighteenth nucleotide, nineteenth nucleotide, twentieth nucleotide or twenty-first nucleotide.

[0322] In another embodiment, the start codon of a polynucleotide can be removed from the polynucleotide sequence in order to have the translation of the polynucleotide begin on a codon that is not the start codon. Translation of the polynucleotide can begin on the codon following the removed start codon or on a downstream start codon or an alternative start codon. In a non-limiting example, the start codon ATG or AUG is removed as the first 3 nucleotides of the polynucleotide sequence in order to have translation initiate on a downstream start codon or alternative start codon. The polynucleotide sequence where the start codon was removed can further comprise at least one masking agent for the downstream start codon and/or alternative start codons in order to control or attempt to control the initiation of translation, the length of the polynucleotide and/or the structure of the polynucleotide.

### Stop Codon Region

[0323] The invention also includes a polynucleotide that comprises both a stop codon region and the polynucleotide described herein (e.g., a polynucleotide comprising a nucleotide sequence encoding an ABCB4, ABCB11, or ATP8B1 polypeptide). In some embodiments, the polynucleotides of the present invention can include at least two stop codons before the 3′ untranslated region (UTR). The stop codon can be selected from TGA, TAA and TAG in the case of DNA, or from UGA, UAA and UAG in the case of RNA. In some embodiments, the polynucleotides of the present invention include the stop codon TGA in the case or DNA, or the stop codon UGA in the case of RNA, and one additional stop codon. In a further embodiment the addition stop codon can be TAA or UAA. In another embodiment, the polynucleotides of the present invention include three consecutive stop codons, four stop codons, or more.

Polynucleotide Comprising an mRNA Encoding an ABCB4, ABCB11, or ATP8B1 Polypeptide

[0324] In certain embodiments, a polynucleotide of the present disclosure, for example a polynucleotide comprising an mRNA nucleotide sequence encoding an ABCB4, ABCB11, or ATP8B1 polypeptide, comprises from 5′ to 3′ end: a 5′ cap provided above; a 5′ UTR, such as the sequences provided above; an open reading frame encoding an ABCB4, ABCB11, or ATP8B1 polypeptide, e.g., a sequence optimized nucleic acid sequence encoding an ABCB4, ABCB11, or ATP8B1 disclosed herein; at least one stop codon; a 3′ UTR, such as the sequences provided above; and a poly-A tail provided above.

[0325] In some embodiments, the polynucleotide further comprises a miRNA binding site, e.g., a miRNA binding site that binds to miRNA-142. In some embodiments, the 5′ UTR comprises the miRNA binding site. In some embodiments, the 3′ UTR comprises the miRNA binding site.

[0326] In some embodiments, a polynucleotide of the present disclosure comprises a nucleotide sequence encoding a polypeptide sequence at least 70%, at least 80%, at least 81%, at least 82%, at least 83%, at least 84%, at least 85%, at least 86%, at least 87%, at least 88%, at least 89%, at least 90%, at least 91%, at least 92%, at least 93%, at least 94%, at least 95%, at least 96% , at least 97%, at least 98%, at least 99%, or 100% identical to the protein sequence of a wild type human ABCB4 (SEQ ID NO:1), wild type human ABCB11 (SEQ ID NO:7), or wild type human ATP8B1 (SEQ ID NO:9).

[0327] In some embodiments, a polynucleotide of the present disclosure, for example a polynucleotide comprising an mRNA nucleotide sequence encoding a polypeptide, comprises (1) a 5′ cap provided above, for example, CAP1, (2) a 5′ UTR, (3) a nucleotide sequence ORF selected from the group consisting of SEQ ID NO:2, 5-8, 10-13, 15-18, or 20-23, (3) a stop codon, (4) a 3′UTR, and (5) a poly-A tail provided above, for example, a poly-A tail of about 100 residues.

[0328] Exemplary ABCB4 nucleotide constructs are described below:
[0329] SEQ ID NO:14 consists from 5′ to 3′ end: 5′ UTR of SEQ ID NO:12, ABCB4 nucleotide ORF of SEQ ID NO:15, and 3′ UTR of SEQ ID NO:13.
[0330] SEQ ID NO:17 consists from 5′ to 3′ end: 5′ UTR of SEQ ID NO:12, ABCB4 nucleotide ORF of SEQ ID NO:18, and 3′ UTR of SEQ ID NO:13.
[0331] SEQ ID NO:20 consists from 5′ to 3′ end: 5′ UTR of SEQ ID NO:12, ABCB4 nucleotide ORF of SEQ ID NO:21, and 3′ UTR of SEQ ID NO:13.
[0332] SEQ ID NO:23 consists from 5′ to 3′ end: 5′ UTR of SEQ ID NO:12, ABCB4 nucleotide ORF of SEQ ID NO:24, and 3′ UTR of SEQ ID NO:13.
[0333] SEQ ID NO:26 consists from 5′ to 3′ end: 5′ UTR of SEQ ID NO:12, ABCB4 nucleotide ORF of SEQ ID NO:27, and 3′ UTR of SEQ ID NO:13.
[0334] SEQ ID NO:29 consists from 5′ to 3′ end: 5′ UTR of SEQ ID NO:12, ABCB4 nucleotide ORF of SEQ ID NO:30, and 3′ UTR of SEQ ID NO:13.
[0335] SEQ ID NO:32 consists from 5′ to 3′ end: 5′ UTR of SEQ ID NO:12, ABCB4 nucleotide ORF of SEQ ID NO:33, and 3′ UTR of SEQ ID NO:13.
[0336] SEQ ID NO:35 consists from 5′ to 3′ end: 5′ UTR of SEQ ID NO:12, ABCB4 nucleotide ORF of SEQ ID NO:36, and 3′ UTR of SEQ ID NO:13.
[0337] SEQ ID NO:38 consists from 5′ to 3′ end: 5′ UTR of SEQ ID NO:12, ABCB4 nucleotide ORF of SEQ ID NO:39, and 3′ UTR of SEQ ID NO:13.
[0338] SEQ ID NO:41 consists from 5′ to 3′ end: 5′ UTR of SEQ ID NO:12, ABCB4 nucleotide ORF of SEQ ID NO:42, and 3′ UTR of SEQ ID NO:13.
[0339] SEQ ID NO: 44 consists from 5′ to 3′ end: 5′ UTR of SEQ ID NO: 12, ABCB4 nucleotide ORF of SEQ ID NO: 45, and 3′ UTR of SEQ ID NO: 13.
[0340] SEQ ID NO: 47 consists from 5′ to 3′ end: 5′ UTR of SEQ ID NO: 12, ABCB4 nucleotide ORF of SEQ ID NO: 48, and 3′ UTR of SEQ ID NO: 13.
[0341] SEQ ID NO50 consists from 5′ to 3′ end: 5′ UTR of SEQ ID NO: 12, ABCB4 nucleotide ORF of SEQ ID NO: 51, and 3′ UTR of SEQ ID NO: 13.
[0342] SEQ ID NO: 53 consists from 5′ to 3′ end: 5′ UTR of SEQ ID NO: 12, ABCB4 nucleotide ORF of SEQ ID NO: 54, and 3′ UTR of SEQ ID NO: 13.
[0343] SEQ ID NO: 56 consists from 5′ to 3′ end: 5′ UTR of SEQ ID NO: 12, ABCB4 nucleotide ORF of SEQ ID NO: 57, and 3′ UTR of SEQ ID NO: 13.
[0344] SEQ ID NO: 59 consists from 5′ to 3′ end: 5′ UTR of SEQ ID NO: 12, ABCB4 nucleotide ORF of SEQ ID NO: 60, and 3′ UTR of SEQ ID NO: 13.
[0345] SEQ ID NO: 62 consists from 5′ to 3′ end: 5′ UTR of SEQ ID NO: 12, ABCB4 nucleotide ORF of SEQ ID NO: 63, and 3′ UTR of SEQ ID NO: 13.
[0346] SEQ ID NO: 65 consists from 5′ to 3′ end: 5′ UTR of SEQ ID NO: 12, ABCB4 nucleotide ORF of SEQ ID NO: 66, and 3′ UTR of SEQ ID NO: 13.

[0347] Exemplary ABC′ B11 nucleotide constructs are described below:
[0348] SEQ ID NO: 126 consists from 5′ to 3′ end: 5′ UTR of SEQ ID NO: 12, ABCB11 nucleotide ORF of SEQ ID NO: 249, and 3′ UTR of SEQ ID NO:13.
[0349] SEQ ID NO: 128 consists from 5′ to 3′ end: 5′ UTR of SEQ ID NO: 12, ABCB11 nucleotide ORF of SEQ ID NO 250, and 3′ UTR of SEQ ID NO: 13.
[0350] SEQ ID NO: 130 consists from 5′ to 3′ end: 5′ UTR of SEQ ID NO: 12, ABCB11 nucleotide ORF of SEQ ID NO: 251, and 3′ UTR of SEQ ID NO: 13.
[0351] SEQ ID NO: 132 consists from 5′ to 3′ end: 5′ UTR of SEQ ID NO: 12, ABCB11 nucleotide ORF of SEQ ID NO: 252, and 3′ UTR of SEQ ID NO: 13.
[0352] SEQ ID NO: 134 consists from 5′ to 3′ end: 5′ UTR of SEQ ID NO: 12, ABCB11 nucleotide ORF of SEQ ID NO: 253, and 3′ UTR of SEQ ID NO: 13.
[0353] SEQ ID NO: 136 consists from 5′ to 3′ end: 5′ UTR of SEQ ID NO: 12, ABCB11 nucleotide ORF of SEQ ID NO: 254, and 3′ UTR of SEQ ID NO: 13.
[0354] SEQ ID NO: 138 consists from 5′ to 3′ end: 5′ UTR of SEQ ID NO: 12, ABCB11 nucleotide ORF of SEQ ID NO: 255, and 3′ UTR of SEQ ID NO: 13.
[0355] SEQ ID NO: 140 consists from 5′ to 3′ end: 5′ UTR of SEQ ID NO: 12, ABCB11 nucleotide ORF of SEQ ID NO: 256, and 3′ UTR of SEQ ID NO: 13.
[0356] SEQ ID NO: 142 consists from 5′ to 3′ end: 5′ UTR of SEQ ID NO: 12, ABCB11 nucleotide ORF of SEQ ID NO: 257, and 3′ UTR of SEQ ID NO: 13.

[0357] Exemplary ATP8B1 nucleotide constructs are described below:
[0358] SEQ ID NO: 258 consists from 5′ to 3′ end: 5′ UTR of SEQ ID NO: 12, ATP8B1 nucleotide ORF of SEQ ID NO: 93, and 3′ UTR of SEQ ID NO: 13.
[0359] SEQ ID NO: 259 consists from 5′ to 3′ end: 5′ UTR of SEQ ID NO: 12, ATP8B1 nucleotide ORF of SEQ ID NO: 94, and 3′ UTR of SEQ ID NO: 13.
[0360] SEQ ID NO 260 consists from 5′ to 3′ end: 5′ UTR of SEQ ID NO: 12, ATP8B1 nucleotide ORF of SEQ ID NO: 95, and 3′ UTR of SEQ ID NO: 13.
[0361] SEQ ID NO:261 consists from 5′ to 3′ end: 5′ UTR of SEQ ID NO: 12, ATP8B1 nucleotide ORF of SEQ ID NO: 96, and 3′ UTR of SEQ ID NO: 13.
[0362] SEQ ID NO: 262 consists from 5′ to 3′ end: 5′ UTR of SEQ ID NO: 12, ATP8B1 nucleotide ORF of SEQ ID NO: 97, and 3′ UTR of SEQ ID NO: 13.
[0363] SEQ ID NO: 263 consists from 5′ to 3′ end: 5′ UTR of SEQ ID NO: 12, ATP8B1 nucleotide ORF of SEQ ID NO: 98, and 3′ UTR of SEQ ID NO: 13.
[0364] SEQ ID NO: 264 consists from 5′ to 3′ end: 5′ UTR of SEQ ID NO: 12, ATP8B1 nucleotide ORF of SEQ ID NO: 99, and 3′ UTR of SEQ ID NO: 13.
[0365] SEQ ID NO: 265 consists from 5′ to 3′ end: 5′ UTR of SEQ ID NO: 12, ATP8B1 nucleotide ORF of SEQ ID NO: 100, and 3′ UTR of SEQ ID NO: 13.
[0366] SEQ ID NO: 266 consists from 5′ to 3′ end: 5 ′ UTR of SEQ ID NO: 12, ATP8B1 nucleotide ORF of SEQ ID NO: 101, and 3′ UTR of SEQ ID NO: 13.
[0367] SEQ ID NO: 267 consists from 5′ to 3′ end: 5′ UTR of SEQ ID NO: 12, ATP8B1 nucleotide ORF of SEQ ID NO: 102, and 3′ UTR of SEQ ID NO: 13.
[0368] SEQ ID NO: 268 consists from 5′ to 3′ end: 5′ UTR of SEQ ID NO: 12, ATP8BI nucleotide ORF of SEQ ID NO: 103, and 3′ UTR of SEQ ID NO: 13.
[0369] SEQ ID NO: 269 consists from 5′ to 3′ end: 5′ UTR of SEQ ID NO: 12, ATP8B1 nucleotide ORF of SEQ ID NO: 104, and 3′ UTR of SEQ ID NO: 13.
[0370] SEQ ID NO: 270 consists from 5′ to 3′ end: 5′ UTR of SEQ ID NO: 12, ATP8B1 nucleotide ORF of SEQ ID NO: 105, and 3′ UTR of SEQ ID NO: 13.
[0371] SEQ ID NO: 271 consists from 5′ to 3′ end: 5′ UTR of SEQ ID NO: 12, ATP8B1 nucleotide ORF of SEQ ID NO: 106, and 3′ UTR of SEQ ID NO: 13.
[0372] SEQ ID NO: 272 consists from 5′ to 3′ end: 5′ UTR of SEQ ID NO: 12, ATP8B1 nucleotide ORF of SEQ ID NO: 107, and 3′ UTR of SEQ ID NO: 13.
[0373] SEQ ID NO: 273 consists from 5′ to 3′ end: 5′ UTR of SEQ ID NO: 12, ATP8B1 nucleotide ORF of SEQ ID NO: 108, and 3′ UTR of SEQ ID NO: 13.
[0374] SEQ ID NO: 274 consists from 5′ to 3′ end: 5′ UTR of SEQ ID NO: 12, ATP8B1 nucleotide ORF of SEQ ID NO: 109, and 3′ UTR of SEQ ID NO: 13.
[0375] SEQ ID NO: 275 consists from 5′ to 3′ end: 5′ UTR of SEQ ID NO: 12, ATP8B1 nucleotide ORF of SEQ ID NO: 110, and 3′ UTR of SEQ ID NO: 13.
[0376] SEQ ID NO: 276 consists from 5′ to 3′ end: 5′ UTR of SEQ ID NO: 12, ATP8B1 nucleotide ORF of SEQ ID NO: 111, and 3′ UTR of SEQ ID NO: 13.
[0377] SEQ ID NO: 277 consists from 5′ to 3′ end: 5′ UTR of SEQ ID NO: 12, ATP8B1 nucleotide ORF of SEQ ID NO: 112, and 3′ UTR of SEQ ID NO: 13.
[0378] SEQ ID NO: 278 consists from 5′ to 3′ end: 5′ UTR of SEQ ID NO: 12, ATP8B1 nucleotide ORF of SEQ ID NO: 113, and 3′ UTR of SEQ ID NO: 13.
[0379] SEQ ID NO: 279 consists from 5′ to 3′ end: 5′ UTR of SEQ ID NO: 12, ATP8B1 nucleotide ORF of SEQ ID NO: 114, and 3′ UTR of SEQ ID NO: 13.
[0380] SEQ ID NO: 280 consists from 5′ to 3′ end: 5′ UTR of SEQ ID NO: 12, ATP8B1 nucleotide ORF of SEQ ID NO: 115, and 3′ UTR of SEQ ID NO: 13.
[0381] SEQ ID NO: 281 consists from 5′ to 3′ end: 5′ UTR of SEQ ID NO: 12, ATP8B1 nucleotide ORF of SEQ ID NO: 116, and 3′ UTR of SEQ ID NO: 13.
[0382] SEQ ID NO: 282 consists from 5′ to 3′ end: 5′ UTR of SEQ ID NO: 12, ATP8B1 nucleotide ORF of SEQ ID NO: 117, and 3′ UTR of SEQ ID NO: 13.

[0383] In certain embodiments, in constructs listed above, all uracils therein are replaced by N1-methylpseudouracil.

[0384] In some embodiments, a polynucleotide of the present disclosure, for example a polynucleotide comprising an mRNA nucleotide sequence encoding a ABCB4, ABCB11, or ATP8B1 polypeptide, comprises (1) a 5′ cap provided above, for example, CAP1, (2) a nucleotide sequence selected from the group consisting of SEQ ID NOs: 14, 17, 20, 23, 26, 29, 32, 25, 38, 41, 44, 47, 50, 53, 56, 59, 62, 65, 126, 128, 130, 132, 134, 136, 138, 140, 142, and 258-282, and (3) a poly-A tail provided above, for example, a poly-A tail of -100 residues. In certain embodiments, in constructs with SEQ ID NOs: 14, 17, 20, 23, 26, 29, 32, 25, 38, 41, 44, 47, 50, 53, 56, 59, 62, 65, 126, 128, 130, 132, 134, 136, 138, 140, 142, and 258-282, all uracils therein are replaced by N1-methylpseudouracil.

### Methods of Making Polynucleotides

[0385] The present disclosure also provides methods for making a polynucleotide of the invention (e.g., a polynucleotide comprising a nucleotide sequence encoding an ABCB4, ABCB11, or ATP8B1 polypeptide) or a complement thereof.

[0386] In some aspects, a polynucleotide (e.g., a RNA, e.g., an mRNA) disclosed herein, and encoding an ABCB4, ABCB11, or ATP8B1 polypeptide, can be constructed using in vitro transcription (IVT). In other aspects, a polynucleotide (e.g., a RNA, e.g., an mRNA) disclosed herein, and encoding an ABCB4, ABCB11, or ATP8B1 polypeptide, can be constructed by chemical synthesis using an oligonucleotide synthesizer.

[0387] In other aspects, a polynucleotide (e.g., a RNA, e.g., an mRNA) disclosed herein, and encoding an ABCB4, ABCB11, or ATP8B1 polypeptide is made by using a host cell. In certain aspects, a polynucleotide (e.g., a RNA, e.g., an mRNA) disclosed herein, and encoding an ABCB4, ABCB11, or ATP8B1 polypeptide is made by one or more combination of the IVT, chemical synthesis, host cell expression, or any other methods known in the art.

[0388] Naturally occurring nucleosides, non-naturally occurring nucleosides, or combinations thereof, can totally or partially naturally replace occurring nucleosides present in the candidate nucleotide sequence and can be incorporated into a sequence-optimized nucleotide sequence (e.g., a RNA, e.g., an mRNA) encoding an ABCB4, ABCB11, or ATP8B1 polypeptide. The resultant polynucleotides, e.g., mRNAs, can then be examined for their ability to produce protein and/or produce a therapeutic outcome.

### In Vitro Transcription/Enzymatic Synthesis

[0389] The polynucleotides of the present invention disclosed herein (e.g., a polynucleotide comprising a nucleotide sequence encoding an ABCB4, ABCB11, or ATP8B1 polypeptide) can be transcribed using an in vitro transcription (IVT) system. The system typically comprises a transcription buffer, nucleotide triphosphates (NTPs), an RNase inhibitor and a polymerase. The NTPs can be selected from, but are not limited to, those described herein including natural and unnatural (modified) NTPs. The polymerase can be selected from, but is not limited to, T7 RNA polymerase, T3 RNA polymerase and mutant polymerases such as, but not limited to, polymerases able to incorporate polynucleotides disclosed herein. See U.S. Publ. No. US20130259923, which is herein incorporated by reference in its entirety.

[0390] Any number of RNA polymerases or variants can be used in the synthesis of the polynucleotides of the present invention. RNA polymerases can be modified by inserting or deleting amino acids of the RNA polymerase sequence. As a non-limiting example, the RNA polymerase can be modified to exhibit an increased ability to incorporate a 2′-modified nucleotide triphosphate compared to an unmodified RNA polymerase (see International Publication WO2008078180 and U.S. Pat. No. 8,101,385; herein incorporated by reference in their entireties).

[0391] Variants can be obtained by evolving an RNA polymerase, optimizing the RNA polymerase amino acid and/or nucleic acid sequence and/or by using other methods known in the art. As a non-limiting example, T7 RNA polymerase variants can be evolved using the continuous directed evolution system set out by Esvelt et al. (Nature 472:499-503 (2011); herein incorporated by reference in its entirety) where clones of T7 RNA polymerase can encode at least one mutation such as, but not limited to, lysine at position 93 substituted for threonine (K93T), I4M, A7T, E63V, V64D, A65E, D66Y, T76N, C125R, S128R, A136T, N165S, G175R, H176L, Y178H, F182L, L196F, G198V, D208Y, ATP8B122K, S228A, Q239R, T243N, G259D, M267I, G280C, H300R, D351A, A354S, E356D, L360P, A383V, Y385C, D388Y, S397R, M401T, N410S, K450R, P451T, G452V, E484A, H523L, H524N, G542V, E565K, K577E, K577M, N601S, S684Y, L699I, K713E, N748D, Q754R, E775K, A827V, D851N or L864F. As another non-limiting example, T7 RNA polymerase variants can encode at least mutation as described in U.S. Pub. Nos. 20100120024 and 20070117112; herein incorporated by reference in their entireties. Variants of RNA polymerase can also include, but are not limited to, substitutional variants, conservative amino acid substitution, insertional variants, and/or deletional variants.

[0392] In one aspect, the polynucleotide can be designed to be recognized by the wild type or variant RNA polymerases. In doing so, the polynucleotide can be modified to contain sites or regions of sequence changes from the wild type or parent chimeric polynucleotide.

[0393] Polynucleotide or nucleic acid synthesis reactions can be carried out by enzymatic methods utilizing polymerases. Polymerases catalyze the creation of phosphodiester bonds between nucleotides in a polynucleotide or nucleic acid chain. Currently known DNA polymerases can be divided into different families based on amino acid sequence comparison and crystal structure analysis. DNA polymerase I (pol I) or A polymerase family, including the Klenow fragments of E. coli, Bacillus DNA polymerase I, Thermus aquaticus (Taq) DNA polymerases, and the T7 RNA and DNA polymerases, is among the best studied of these families. Another large family is DNA polymerase α (pol α) or B polymerase family, including all eukaryotic replicating DNA polymerases and polymerases from phages T4 and RB69. Although they employ similar catalytic mechanism, these families of polymerases differ in substrate specificity, substrate analog-incorporating efficiency, degree and rate for primer extension, mode of DNA synthesis, exonuclease activity, and sensitivity against inhibitors.

[0394] DNA polymerases are also selected based on the optimum reaction conditions they require, such as reaction temperature, pH, and template and primer concentrations. Sometimes a combination of more than one DNA polymerases is employed to achieve the desired DNA fragment size and synthesis efficiency. For example, Cheng et al. increase pH, add glycerol and dimethyl sulfoxide, decrease denaturation times, increase extension times, and utilize a secondary thermostable DNA polymerase that possesses a 3′ to 5′ exonuclease activity to effectively amplify long targets from cloned inserts and human genomic DNA. (Cheng et al., PNAS 91:5695-5699 (1994), the contents of which are incorporated herein by reference in their entirety). RNA polymerases from bacteriophage T3, T7, and SP6 have been widely used to prepare RNAs for biochemical and biophysical studies. RNA polymerases, capping enzymes, and poly-A polymerases are disclosed in the co-pending International Publication No. WO2014/028429, the contents of which are incorporated herein by reference in their entirety.

[0395] In one aspect, the RNA polymerase which can be used in the synthesis of the polynucleotides of the present invention is a Syn5 RNA polymerase. (see Zhu et al. Nucleic Acids Research 2013, doi:10.1093/nar/gkt1193, which is herein incorporated by reference in its entirety). The Syn5 RNA polymerase was recently characterized from marine cyanophage Syn5 by Zhu et al. where they also identified the promoter sequence (see Zhu et al. Nucleic Acids Research 2013, the contents of which is herein incorporated by reference in its entirety). Zhu et al. found that Syn5 RNA polymerase catalyzed RNA synthesis over a wider range of temperatures and salinity as compared to T7 RNA polymerase. Additionally, the requirement for the initiating nucleotide at the promoter was found to be less stringent for Syn5 RNA polymerase as compared to the T7 RNA polymerase making Syn5 RNA polymerase promising for RNA synthesis.

[0396] In one aspect, a Syn5 RNA polymerase can be used in the synthesis of the polynucleotides described herein. As a non-limiting example, a Syn5 RNA polymerase can be used in the synthesis of the polynucleotide requiring a precise 3′-terminus. In one aspect, a Syn5 promoter can be used in the synthesis of the polynucleotides. As a non-limiting example, the Syn5 promoter can be 5″-ATTGGGCACCCGTAAGGG-3′ (SEQ ID NO:283 as described by Zhu et al. (Nucleic Acids Research 2013).

[0397] In one aspect, a Syn5 RNA polymerase can be used in the synthesis of polynucleotides comprising at least one chemical modification described herein and/or known in the art (see e.g., the incorporation of pseudo-UTP and 5Me-CTP described in Zhu et al. Nucleic Acids Research 2013).

[0398] In one aspect, the polynucleotides described herein can be synthesized using a Syn5 RNA polymerase which has been purified using modified and improved purification procedure described by Zhu et al. (Nucleic Acids Research 2013).

[0399] Various tools in genetic engineering are based on the enzymatic amplification of a target gene which acts as a template. For the study of sequences of individual genes or specific regions of interest and other research needs, it is necessary to generate multiple copies of a target gene from a small sample of polynucleotides or nucleic acids. Such methods can be applied in the manufacture of the polynucleotides of the invention. For example, polymerase chain reaction (PCR), strand displacement amplification (SDA), nucleic acid sequence-based amplification (NASBA), also called transcription mediated amplification (TMA), and/or rolling-circle amplification (RCA) can be utilized in the manufacture of one or more regions of the polynucleotides of the present invention. Assembling polynucleotides or nucleic acids by a ligase is also widely used.

Chemical synthesis

[0400] Standard methods can be applied to synthesize an isolated polynucleotide sequence encoding an isolated polypeptide of interest, such as a polynucleotide of the invention (e.g., a polynucleotide comprising a nucleotide sequence encoding an ABCB4, ABCB11, or ATP8B1 polypeptide). For example, a single DNA or RNA oligomer containing a codon-optimized nucleotide sequence coding for the particular isolated polypeptide can be synthesized. In other aspects, several small oligonucleotides coding for portions of the desired polypeptide can be synthesized and then ligated. In some aspects, the individual oligonucleotides typically contain 5′ or 3′ overhangs for complementary assembly.

[0401] A polynucleotide disclosed herein (e.g., a RNA, e.g., an mRNA) can be chemically synthesized using chemical synthesis methods and potential nucleobase substitutions known in the art. See, for example, International Publication Nos. WO2014093924, WO2013052523; WO2013039857, WO2012135805, WO2013151671; U.S. Publ. No. US20130115272; or U.S. Pat. Nos. 8,999,380 or 8,710,200, all of which are herein incorporated by reference in their entireties.

### Purification of Polynucleotides Encoding ABCB4, ABCB11, or ATP8B1

[0402] Purification of the polynucleotides described herein (e.g., a polynucleotide comprising a nucleotide sequence encoding an ABCB4, ABCB11, or ATP8B1 polypeptide) can include, but is not limited to, polynucleotide clean-up, quality assurance and quality control. Clean-up can be performed by methods known in the arts such as, but not limited to, AGENCOURT® beads (Beckman Coulter Genomics, Danvers, Mass.), poly-T beads, LNA™ oligo-T capture probes (EXIQON® Inc., Vedbaek, Denmark) or HPLC based purification methods such as, but not limited to, strong anion exchange HPLC, weak anion exchange HPLC, reverse phase HPLC (RP-HPLC), and hydrophobic interaction HPLC (HIC-HPLC).

[0403] The term “purified” when used in relation to a polynucleotide such as a “purified polynucleotide” refers to one that is separated from at least one contaminant. As used herein, a “contaminant” is any substance that makes another unfit, impure or inferior. Thus, a purified polynucleotide (e.g., DNA and RNA) is present in a form or setting different from that in which it is found in nature, or a form or setting different from that which existed prior to subjecting it to a treatment or purification method.

[0404] In some embodiments, purification of a polynucleotide of the invention (e.g., a polynucleotide comprising a nucleotide sequence encoding an ABCB4, ABCB11, or ATP8B1 polypeptide) removes impurities that can reduce or remove an unwanted immune response, e.g., reducing cytokine activity.

[0405] In some embodiments, the polynucleotide of the invention (e.g., a polynucleotide comprising a nucleotide sequence encoding an ABCB4, ABCB11, or ATP8B1 polypeptide) is purified prior to administration using column chromatography (e.g., strong anion exchange HPLC, weak anion exchange HPLC, reverse phase HPLC (RP-HPLC), and hydrophobic interaction HPLC (HIC-HPLC), or (LCMS)).

[0406] In some embodiments, the polynucleotide of the invention (e.g., a polynucleotide comprising a nucleotide sequence encoding an ABCB4, ABCB11, or ATP8B1 polypeptide) purified using column chromatography (e.g., strong anion exchange HPLC, weak anion exchange HPLC, reverse phase HPLC (RP-HPLC, hydrophobic interaction HPLC (HIC-HPLC), or (LCMS)) presents increased expression of the encoded ABCB4, ABCB11, or ATP8B1 protein compared to the expression level obtained with the same polynucleotide of the present disclosure purified by a different purification method.

[0407] In some embodiments, a column chromatography (e.g., strong anion exchange HPLC, weak anion exchange HPLC, reverse phase HPLC (RP-HPLC), hydrophobic interaction HPLC (HIC-HPLC), or (LCMS)) purified polynucleotide comprises a nucleotide sequence encoding an ABCB4, ABCB11, or ATP8B1 polypeptide comprising one or more of the point mutations known in the art.

[0408] In some embodiments, the use of RP-HPLC purified polynucleotide increases ABCB4, ABCB11, or ATP8B1 protein expression levels in cells when introduced into those cells, e.g., by 10-100%, i.e., at least about 10%, at least about 20%, at least about 25%, at least about 30%, at least about 35%, at least about 40%, at least about 45%, at least about 50%, at least about 55%, at least about 60%, at least about 65%, at least about 70%, at least about 75%, at least about 80%, at least about 90%, at least about 95%, or at least about 100% with respect to the expression levels of ABCB4, ABCB11, or ATP8B1 protein in the cells before the RP-HPLC purified polynucleotide was introduced in the cells, or after a non-RP-HPLC purified polynucleotide was introduced in the cells.

[0409] In some embodiments, the use of RP-HPLC purified polynucleotide increases functional ABCB4, ABCB11, or ATP8B1 protein expression levels in cells when introduced into those cells, e.g., by 10-100%, i.e., at least about 10%, at least about 20%, at least about 25%, at least about 30%, at least about 35%, at least about 40%, at least about 45%, at least about 50%, at least about 55%, at least about 60%, at least about 65%, at least about 70%, at least about 75%, at least about 80%, at least about 90%, at least about 95%, or at least about 100% with respect to the functional expression levels of ABCB4, ABCB11, or ATP8B1 protein in the cells before the RP-HPLC purified polynucleotide was introduced in the cells, or after a non-RP-HPLC purified polynucleotide was introduced in the cells.

[0410] In some embodiments, the use of RP-HPLC purified polynucleotide increases detectable ABCB4, ABCB11, or ATP8B1 activity in cells when introduced into those cells, e.g., by 10-100%, i.e., at least about 10%, at least about 20%, at least about 25%, at least about 30%, at least about 35%, at least about 40%, at least about 45%, at least about 50%, at least about 55%, at least about 60%, at least about 65%, at least about 70%, at least about 75%, at least about 80%, at least about 90%, at least about 95%, or at least about 100% with respect to the activity levels of functional ABCB4, ABCB11, or ATP8B1 in the cells before the RP-HPLC purified polynucleotide was introduced in the cells, or after a non-RP-HPLC purified polynucleotide was introduced in the cells.

[0411] In some embodiments, the purified polynucleotide is at least about 80% pure, at least about 85% pure, at least about 90% pure, at least about 95% pure, at least about 96% pure, at least about 97% pure, at least about 98% pure, at least about 99% pure, or about 100% pure. A quality assurance and/or quality control check can be conducted using methods such as, but not limited to, gel electrophoresis, UV absorbance, or analytical HPLC. In another embodiment, the polynucleotide can be sequenced by methods including, but not limited to reverse-transcriptase-PCR.

### Quantification of Expressed Polynucleotides Encoding ABCB4, ABCB11, or ATP8B1

[0412] In some embodiments, the polynucleotides of the present invention (e.g., a polynucleotide comprising a nucleotide sequence encoding an ABCB4, ABCB11, or ATP8B1 polypeptide), their expression products, as well as degradation products and metabolites can be quantified according to methods known in the art.

[0413] In some embodiments, the polynucleotides of the present invention can be quantified in exosomes or when derived from one or more bodily fluid. As used herein “bodily fluids” include peripheral blood, serum, plasma, ascites, urine, cerebrospinal fluid (CSF), sputum, saliva, bone marrow, synovial fluid, aqueous humor, amniotic fluid, cerumen, breast milk, broncheoalveolar lavage fluid, semen, prostatic fluid, cowper's fluid or pre-ejaculatory fluid, sweat, fecal matter, hair, tears, cyst fluid, pleural and peritoneal fluid, pericardial fluid, lymph, chyme, chyle, bile, interstitial fluid, menses, pus, sebum, vomit, vaginal secretions, mucosal secretion, stool water, pancreatic juice, lavage fluids from sinus cavities, bronchopulmonary aspirates, blastocyl cavity fluid, and umbilical cord blood. Alternatively, exosomes can be retrieved from an organ selected from the group consisting of lung, heart, pancreas, stomach, intestine, bladder, kidney, ovary, testis, skin, colon, breast, prostate, brain, esophagus, liver, and placenta.

[0414] In the exosome quantification method, a sample of not more than 2mL is obtained from the subject and the exosomes isolated by size exclusion chromatography, density gradient centrifugation, differential centrifugation, nanomembrane ultrafiltration, immunoabsorbent capture, affinity purification, microfluidic separation, or combinations thereof. In the analysis, the level or concentration of a polynucleotide can be an expression level, presence, absence, truncation or alteration of the administered construct. It is advantageous to correlate the level with one or more clinical phenotypes or with an assay for a human disease biomarker.

[0415] The assay can be performed using construct specific probes, cytometry, qRT-PCR, real-time PCR, PCR, flow cytometry, electrophoresis, mass spectrometry, or combinations thereof while the exosomes can be isolated using immunohistochemical methods such as enzyme linked immunosorbent assay (ELISA) methods. Exosomes can also be isolated by size exclusion chromatography, density gradient centrifugation, differential centrifugation, nanomembrane ultrafiltration, immunoabsorbent capture, affinity purification, microfluidic separation, or combinations thereof.

[0416] These methods afford the investigator the ability to monitor, in real time, the level of polynucleotides remaining or delivered. This is possible because the polynucleotides of the present invention differ from the endogenous forms due to the structural or chemical modifications.

[0417] In some embodiments, the polynucleotide can be quantified using methods such as, but not limited to, ultraviolet visible spectroscopy (UV/Vis). A non-limiting example of a UV/Vis spectrometer is a NANODROP® spectrometer (ThermoFisher, Waltham, Mass.). The quantified polynucleotide can be analyzed in order to determine if the polynucleotide can be of proper size, check that no degradation of the polynucleotide has occurred. Degradation of the polynucleotide can be checked by methods such as, but not limited to, agarose gel electrophoresis, HPLC based purification methods such as, but not limited to, strong anion exchange HPLC, weak anion exchange HPLC, reverse phase HPLC (RP-HPLC), and hydrophobic interaction HPLC (HIC-HPLC), liquid chromatography-mass spectrometry (LCMS), capillary electrophoresis (CE) and capillary gel electrophoresis (CGE).

### Pharmaceutical Compositions and Formulations

[0418] The present invention provides pharmaceutical compositions and formulations that comprise any of the polynucleotides described above. In some embodiments, the composition or formulation further comprises a delivery agent.

[0419] In some embodiments, the composition or formulation can contain a polynucleotide comprising a sequence optimized nucleic acid sequence disclosed herein which encodes an ABCB4, ABCB11, or ATP8B1 polypeptide. In some embodiments, the composition or formulation can contain a polynucleotide comprising a sequence optimized nucleic acid sequence disclosed herein which encodes an ABCB4 polypeptide, a polynucleotide comprising a sequence optimized nucleic acid sequence disclosed herein which encodes an ABCB11 polypeptide, and a polynucleotide comprising a sequence optimized nucleic acid sequence disclosed herein which encodes an ATP8B1 polypeptide. In some embodiments, the composition or formulation can contain a polynucleotide (e.g., a RNA, e.g., an mRNA) comprising a polynucleotide (e.g., an ORF) having significant sequence identity to a sequence optimized nucleic acid sequence disclosed herein which encodes an ABCB4, ABCB11, or ATP8B1 polypeptide. In some embodiments, the composition or formulation can contain a polynucleotide (e.g., a RNA, e.g., an mRNA) comprising a polynucleotide (e.g., an ORF) having significant sequence identity to a sequence optimized nucleic acid sequence disclosed herein which encodes an ABCB4 polypeptide, a polynucleotide (e.g., a RNA, e.g., an mRNA) comprising a polynucleotide (e.g., an ORF) having significant sequence identity to a sequence optimized nucleic acid sequence disclosed herein which encodes an ABCB11 polypeptide, and a polynucleotide (e.g., a RNA, e.g., an mRNA) comprising a polynucleotide (e.g., an ORF) having significant sequence identity to a sequence optimized nucleic acid sequence disclosed herein which encodes an ATP8B1 polypeptide. In some embodiments, the polynucleotide further comprises a miRNA binding site, e.g., a miRNA binding site that binds miR-126, miR-142, miR-144, miR-146, miR-150, miR-155, miR-16, miR-21, miR-223, miR-24, miR-27 and miR-26a.

[0420] Pharmaceutical compositions or formulation can optionally comprise one or more additional active substances, e.g., therapeutically and/or prophylactically active substances. Pharmaceutical compositions or formulation of the present invention can be sterile and/or pyrogen-free. General considerations in the formulation and/or manufacture of pharmaceutical agents can be found, for example, in Remington: The Science and Practice of Pharmacy 21^{st} ed., Lippincott Williams & Wilkins, 2005 (incorporated herein by reference in its entirety). In some embodiments, compositions are administered to humans, human patients or subjects. For the purposes of the present disclosure, the phrase “active ingredient” generally refers to polynucleotides to be delivered as described herein.

[0421] Formulations and pharmaceutical compositions described herein can be prepared by any method known or hereafter developed in the art of pharmacology. In general, such preparatory methods include the step of associating the active ingredient with an excipient and/or one or more other accessory ingredients, and then, if necessary and/or desirable, dividing, shaping and/or packaging the product into a desired single- or multi-dose unit.

[0422] A pharmaceutical composition or formulation in accordance with the present disclosure can be prepared, packaged, and/or sold in bulk, as a single unit dose, and/or as a plurality of single unit doses. As used herein, a “unit dose” refers to a discrete amount of the pharmaceutical composition comprising a predetermined amount of the active ingredient. The amount of the active ingredient is generally equal to the dosage of the active ingredient that would be administered to a subject and/or a convenient fraction of such a dosage such as, for example, one-half or one-third of such a dosage.

[0423] Relative amounts of the active ingredient, the pharmaceutically acceptable excipient, and/or any additional ingredients in a pharmaceutical composition in accordance with the present disclosure can vary, depending upon the identity, size, and/or condition of the subject being treated and further depending upon the route by which the composition is to be administered.

[0424] In some embodiments, the compositions and formulations described herein can contain at least one polynucleotide of the invention. As a non-limiting example, the composition or formulation can contain 1, 2, 3, 4 or 5 polynucleotides of the invention. In some embodiments, the compositions or formulations described herein can comprise more than one type of polynucleotide. In some embodiments, the composition or formulation can comprise a polynucleotide in linear and circular form. In another embodiment, the composition or formulation can comprise a circular polynucleotide and an in vitro transcribed (IVT) polynucleotide. In yet another embodiment, the composition or formulation can comprise an IVT polynucleotide, a chimeric polynucleotide and a circular polynucleotide.

[0425] Although the descriptions of pharmaceutical compositions and formulations provided herein are principally directed to pharmaceutical compositions and formulations that are suitable for administration to humans, it will be understood by the skilled artisan that such compositions are generally suitable for administration to any other animal, e.g., to non-human animals, e.g. non-human mammals.

[0426] The present invention provides pharmaceutical formulations that comprise one or more polynucleotides described herein (e.g., one or more polynucleotides comprising a nucleotide sequence encoding an ABCB4, ABCB11, or ATP8B1 polypeptide). The polynucleotides described herein can be formulated using one or more excipients to: (1) increase stability; (2) increase cell transfection; (3) permit the sustained or delayed release (e.g., from a depot formulation of the polynucleotide); (4) alter the biodistribution (e.g., target the polynucleotide to specific tissues or cell types); (5) increase the translation of encoded protein in vivo; and/or (6) alter the release profile of encoded protein in vivo. In some embodiments, the pharmaceutical formulation further comprises a delivery agent comprising, e.g., a compound having the Formula (I), e.g., any of Compounds 1-232, e.g., Compound II; a compound having the Formula (III), (IV), (V), or (VI), e.g., any of Compounds 233-342, e.g., Compound VI; or a compound having the Formula (VIII), e.g., any of Compounds 419-428, e.g., Compound I, or any combination thereof In some embodiments, the delivery agent comprises Compound II, DSPC, Cholesterol, and Compound I or PEG-DMG, e.g., with a mole ratio of about 50:10:38.5:1.5. In some embodiments, the delivery agent comprises Compound II, DSPC, Cholesterol, and Compound I or PEG-DMG, e.g., with a mole ratio of about 47.5:10.5:39.0:3.0. In some embodiments, the delivery agent comprises Compound VI, DSPC, Cholesterol, and Compound I or PEG-DMG, e.g., with a mole ratio of about 50:10:38.5:1.5. In some embodiments, the delivery agent comprises Compound VI, DSPC, Cholesterol, and Compound I or PEG-DMG, e.g., with a mole ratio of about 47.5:10.5:39.0:3.0.

[0427] A pharmaceutically acceptable excipient, as used herein, includes, but are not limited to, any and all solvents, dispersion media, or other liquid vehicles, dispersion or suspension aids, diluents, granulating and/or dispersing agents, surface active agents, isotonic agents, thickening or emulsifying agents, preservatives, binders, lubricants or oil, coloring, sweetening or flavoring agents, stabilizers, antioxidants, antimicrobial or antifungal agents, osmolality adjusting agents, pH adjusting agents, buffers, chelants, cyoprotectants, and/or bulking agents, as suited to the particular dosage form desired. Various excipients for formulating pharmaceutical compositions and techniques for preparing the composition are known in the art (see Remington: The Science and Practice of Pharmacy, 21st Edition, A. R. Gennaro (Lippincott, Williams & Wilkins, Baltimore, Md., 2006; incorporated herein by reference in its entirety).

[0428] Exemplary diluents include, but are not limited to, calcium or sodium carbonate, calcium phosphate, calcium hydrogen phosphate, sodium phosphate, lactose, sucrose, cellulose, microcrystalline cellulose, kaolin, mannitol, sorbitol, etc., and/or combinations thereof.

[0429] Exemplary granulating and/or dispersing agents include, but are not limited to, starches, pregelatinized starches, or microcrystalline starch, alginic acid, guar gum, agar, poly(vinyl-pyrrolidone), (providone), cross-linked poly(vinyl-pyrrolidone) (crospovidone), cellulose, methylcellulose, carboxymethyl cellulose, cross-linked sodium carboxymethyl cellulose (croscarmellose), magnesium aluminum silicate (VEEGUM®), sodium lauryl sulfate, etc., and/or combinations thereof.

[0430] Exemplary surface active agents and/or emulsifiers include, but are not limited to, natural emulsifiers (e.g., acacia, agar, alginic acid, sodium alginate, tragacanth, chondrux, cholesterol, xanthan, pectin, gelatin, egg yolk, casein, wool fat, cholesterol, wax, and lecithin), sorbitan fatty acid esters (e.g., polyoxyethylene sorbitan monooleate [TWEEN®80], sorbitan monopalmitate [SPAN®40], glyceryl monooleate, polyoxyethylene esters, polyethylene glycol fatty acid esters (e.g., CREMOPHOR®), polyoxyethylene ethers (e.g., polyoxyethylene lauryl ether [BRIJ®30]), PLUORINC®F 68, POLOXAMER®188, etc. and/or combinations thereof.

[0431] Exemplary binding agents include, but are not limited to, starch, gelatin, sugars (e.g., sucrose, glucose, dextrose, dextrin, molasses, lactose, lactitol, mannitol), amino acids (e.g., glycine), natural and synthetic gums (e.g., acacia, sodium alginate), ethylcellulose, hydroxyethylcellulose, hydroxypropyl methylcellulose, etc., and combinations thereof.

[0432] Oxidation is a potential degradation pathway for mRNA, especially for liquid mRNA formulations. In order to prevent oxidation, antioxidants can be added to the formulations. Exemplary antioxidants include, but are not limited to, alpha tocopherol, ascorbic acid, ascorbyl palmitate, benzyl alcohol, butylated hydroxyanisole, m-cresol, methionine, butylated hydroxytoluene, monothioglycerol, sodium or potassium metabisulfite, propionic acid, propyl gallate, sodium ascorbate, etc., and combinations thereof.

[0433] Exemplary chelating agents include, but are not limited to, ethylenediaminetetraacetic acid (EDTA), citric acid monohydrate, disodium edetate, fumaric acid, malic acid, phosphoric acid, sodium edetate, tartaric acid, trisodium edetate, etc., and combinations thereof.

[0434] Exemplary antimicrobial or antifungal agents include, but are not limited to, benzalkonium chloride, benzethonium chloride, methyl paraben, ethyl paraben, propyl paraben, butyl paraben, benzoic acid, hydroxybenzoic acid, potassium or sodium benzoate, potassium or sodium sorbate, sodium propionate, sorbic acid, etc., and combinations thereof.

[0435] Exemplary preservatives include, but are not limited to, vitamin A, vitamin C, vitamin E, beta-carotene, citric acid, ascorbic acid, butylated hydroxyanisol, ethylenediamine, sodium lauryl sulfate (SLS), sodium lauryl ether sulfate (SLES), etc., and combinations thereof. In some embodiments, the pH of polynucleotide solutions is maintained between pH 5 and pH 8 to improve stability. Exemplary buffers to control pH can include, but are not limited to sodium phosphate, sodium citrate, sodium succinate, histidine (or histidine-HCl), sodium malate, sodium carbonate, etc., and/or combinations thereof.

[0436] Exemplary lubricating agents include, but are not limited to, magnesium stearate, calcium stearate, stearic acid, silica, talc, malt, hydrogenated vegetable oils, polyethylene glycol, sodium benzoate, sodium or magnesium lauryl sulfate, etc., and combinations thereof. The pharmaceutical composition or formulation described here can contain a cryoprotectant to stabilize a polynucleotide described herein during freezing. Exemplary cryoprotectants include, but are not limited to mannitol, sucrose, trehalose, lactose, glycerol, dextrose, etc., and combinations thereof.

[0437] The pharmaceutical composition or formulation described here can contain a bulking agent in lyophilized polynucleotide formulations to yield a “pharmaceutically elegant” cake, stabilize the lyophilized polynucleotides during long term (e.g., 36 month) storage. Exemplary bulking agents of the present invention can include, but are not limited to sucrose, trehalose, mannitol, glycine, lactose, raffinose, and combinations thereof.

[0438] In some embodiments, the pharmaceutical composition or formulation further comprises a delivery agent. The delivery agent of the present disclosure can include, without limitation, liposomes, lipid nanoparticles, lipidoids, polymers, lipoplexes, microvesicles, exosomes, peptides, proteins, cells transfected with polynucleotides, hyaluronidase, nanoparticle mimics, nanotubes, conjugates, and combinations thereof.

### Delivery Agents

### Lipid Compound

[0439] The present disclosure provides pharmaceutical compositions with advantageous properties. The lipid compositions described herein may be advantageously used in lipid nanoparticle compositions for the delivery of therapeutic and/or prophylactic agents, e.g., mRNAs, to mammalian cells or organs. For example, the lipids described herein have little or no immunogenicity. For example, the lipid compounds disclosed herein have a lower immunogenicity as compared to a reference lipid (e.g., MC3, KC2, or DLinDMA). For example, a formulation comprising a lipid disclosed herein and a therapeutic or prophylactic agent, e.g., mRNA, has an increased therapeutic index as compared to a corresponding formulation which comprises a reference lipid (e.g., MC3, KC2, or DLinDMA) and the same therapeutic or prophylactic agent.

[0440] In certain embodiments, the present application provides pharmaceutical compositions comprising: a polynucleotide comprising a nucleotide sequence encoding an ABCB4, ABCB11, or ATP8B1 polypeptide; and a delivery agent.

[0441] In certain embodiments, the present application provides pharmaceutical compositions comprising: a polynucleotide comprising a nucleotide sequence encoding an ABCB4 polypeptide, a polynucleotide comprising a nucleotide sequence encoding an ABCB11 polypeptide, and a polynucleotide comprising a nucleotide sequence encoding an ATP8B1 polypeptide; and a delivery agent.

### Lipid Nanoparticle Formulations

[0442] In some embodiments, nucleic acids of the invention (e.g. ABCB4, ABCB11, or ATP8B1 mRNA) are formulated in a lipid nanoparticle (LNP). Lipid nanoparticles typically comprise ionizable cationic lipid, non-cationic lipid, sterol and PEG lipid components along with the nucleic acid cargo of interest. The lipid nanoparticles of the invention can be generated using components, compositions, and methods as are generally known in the art, see for example PCT/US2016/052352; PCT/US2016/068300; PCT/US2017/037551; PCT/US2015/027400; PCT/US2016/047406; PCT/US2016000129; PCT/US2016/014280; PCT/US2016/014280; PCT/US2017/038426; PCT/US2014/027077; PCT/US2014/055394; PCT/US2016/52117; PCT/US2012/069610; PCT/US2017/027492; PCT/US2016/059575 and PCT/US2016/069491 all of which are incorporated by reference herein in their entirety.

[0443] Nucleic acids of the present disclosure (e.g. ABCB4, ABCB11, or ATP8B1 mRNA) are typically formulated in lipid nanoparticle. In some embodiments, the lipid nanoparticle comprises at least one ionizable cationic lipid, at least one non-cationic lipid, at least one sterol, and/or at least one polyethylene glycol (PEG)-modified lipid.

[0444] In some embodiments, the lipid nanoparticle comprises a molar ratio of 20-60% ionizable cationic lipid. For example, the lipid nanoparticle may comprise a molar ratio of 20-50%, 20-40%, 20-30%, 30-60%, 30-50%, 30-40%, 40-60%, 40-50%, or 50-60% ionizable cationic lipid. In some embodiments, the lipid nanoparticle comprises a molar ratio of 20%, 30%, 40%, 50, or 60% ionizable cationic lipid.

[0445] In some embodiments, the lipid nanoparticle comprises a molar ratio of 5-25% non-cationic lipid. For example, the lipid nanoparticle may comprise a molar ratio of 5-20%, 5-15%, 5-10%, 10-25%, 10-20%, 10-25%, 15-25%, 15-20%, or 20-25% non-cationic lipid. In some embodiments, the lipid nanoparticle comprises a molar ratio of 5%, 10%, 15%, 20%, or 25% non-cationic lipid.

[0446] In some embodiments, the lipid nanoparticle comprises a molar ratio of 25-55% sterol. For example, the lipid nanoparticle may comprise a molar ratio of 25-50%, 25-45%, 25-40%, 25-35%, 25-30%, 30-55%, 30-50%, 30-45%, 30-40%, 30-35%, 35-55%, 35-50%, 35-45%, 35-40%, 40-55%, 40-50%, 40-45%, 45-55%, 45-50%, or 50-55% sterol. In some embodiments, the lipid nanoparticle comprises a molar ratio of 25%, 30%, 35%, 40%, 45%, 50%, or 55% sterol.

[0447] In some embodiments, the lipid nanoparticle comprises a molar ratio of 0.5-15% PEG-modified lipid. For example, the lipid nanoparticle may comprise a molar ratio of 0.5-10%, 0.5-5%, 1-15%, 1-10%, 1-5%, 2-15%, 2-10%, 2-5%, 5-15%, 5-10%, or 10-15%. In some embodiments, the lipid nanoparticle comprises a molar ratio of 0.5%, 1%, 2%, 3%, 4%, 5%, 6%, 7%, 8%, 9%, 10%, 11%, 12%, 13%, 14%, or 15% PEG-modified lipid.

[0448] In some embodiments, the lipid nanoparticle comprises a molar ratio of 20-60% ionizable cationic lipid, 5-25% non-cationic lipid, 25-55% sterol, and 0.5-15% PEG-modified lipid.

### Ionizable Lipids

[0449] In some aspects, the ionizable lipids of the present disclosure may be one or more of compounds of Formula (I):

[chemical structure]

or their N-oxides, or salts or isomers thereof, wherein:

[0450] R₁ is selected from the group consisting of C₅₋₃₀ alkyl, C₅₋₂₀ alkenyl, —R*YR″, —YR″, and —R″M′R′;

[0451] R₂ and R₃ are independently selected from the group consisting of H, C₁₋₁₄ alkyl, C₂₋₁₄ alkenyl, —R*YR″, —YR″, and —R*OR″, or R₂ and R₃, together with the atom to which they are attached, form a heterocycle or carbocycle;

[0452] R₄ is selected from the group consisting of hydrogen, a C₃₋₆ carbocycle, —(CH₂)ₙQ, —(CH₂)ₙCHQR, —CHQR, —CQ(R)₂, and unsubstituted C₁₋₆ alkyl, where Q is selected from a carbocycle, heterocycle, —OR, —O(CH₂)ₙN(R)₂, —C(O)OR, —OC(O)R, —CX₃, —CX₂H, —CXH₂, —CN, —N(R)₂, —C(O)N(R)₂, —N(R)C(O)R, —N(R)S(O)₂R, —N(R)C(O)N(R)₂, —N(R)C(S)N(R)₂, —N(R)R₈, —N(R)S(O)₂R₈, —O(CH₂)ₙOR, —N(R)C(═NR₉)N(R)₂, —N(R)C(═CHR₉)N(R)₂, —OC(O)N(R)₂, —N(R)C(O)OR, —N(OR)C(O)R, —N(OR)S(O)₂R, —N(OR)C(O)OR, —N(OR)C(O)N(R)₂, —N(OR)C(S)N(R)₂, —N(OR)C(═NR₉)N(R)₂, —N(OR)C(═CHR₉)N(R)₂, —C(═NR₉)N(R)₂, —C(═NR₉)R, —C(O)N(R)OR, and —C(R)N(R)₂C(O)OR, and each n is independently selected from 1, 2, 3, 4, and 5;

[0453] each R₅ is independently selected from the group consisting of C₁₋₃ alkyl, C₂₋₃ alkenyl, and H;

[0454] each R₆ is independently selected from the group consisting of C₁₋₃ alkyl, C₂₋₃ alkenyl, and H;

[0455] M and M′ are independently selected from —C(O)O—, —OC(O)—, —OC(O)-M″-C(O)O—, —C(O)N(R′)—, —N(R′)C(O)—, —C(O)—, —C(S)—, —C(S)S—, —SC(S)—, —CH(OH)—, —P(O)(OR′)O—, —S(O)₂—, —S—S—, an aryl group, and a heteroaryl group, in which M″ is a bond, C₁₋₁₃ alkyl or C₂₋₁₃ alkenyl;

[0456] R₇ is selected from the group consisting of C₁₋₃ alkyl, C₂₋₃ alkenyl, and H;

[0457] R₈ is selected from the group consisting of C₃₋₆ carbocycle and heterocycle;

[0458] R₉ is selected from the group consisting of H, CN, NO₂, C₁₋₆ alkyl, —OR, —S(O)₂R, —S(O)₂N(R)₂, C₂₋₆ alkenyl, C₃₋₆ carbocycle and heterocycle;

[0459] each R is independently selected from the group consisting of C₁₋₃ alkyl, C₂₋₃ alkenyl, and H;

[0460] each R′ is independently selected from the group consisting of C₁₋₁₈ alkyl, C₂₋₁₈ alkenyl, —R*YR″, —YR″, and H;

[0461] each R″ is independently selected from the group consisting of C₃₋₁₅ alkyl and C₃₋₁₅ alkenyl;

[0462] each R* is independently selected from the group consisting of C₁₋₁₂ alkyl and C₂₋₁₂ alkenyl;

[0463] each Y is independently a C₃₋₆ carbocycle;

[0464] each X is independently selected from the group consisting of F, Cl, Br, and I; and m is selected from 5, 6, 7, 8, 9, 10, 11, 12, and 13; and wherein when R₄ is —(CH₂)ₙQ, —(CH₂)ₙCHQR, —CHQR, or —CQ(R)₂, then (i) Q is not —N(R)₂ when n is 1, 2, 3, 4 or 5, or (ii) Q is not 5, 6, or 7-membered heterocycloalkyl when n is 1 or 2.

[0465] In certain embodiments, a subset of compounds of Formula (I) includes those of Formula (IA):

[chemical structure]

or its N-oxide, or a salt or isomer thereof, wherein 1 is selected from 1, 2, 3, 4, and 5; m is selected from 5, 6, 7, 8, and 9; M₁ is a bond or M′; R₄ is hydrogen, unsubstituted C₁₋₃ alkyl, or —(CH₂)ₙQ, in which Q is OH, —NHC(S)N(R)₂, —NHC(O)N(R)₂, —N(R)C(O)R, —N(R)S(O)₂R, —N(R)R₈, —NHC(═NR₉)N(R)₂, —NHC(═CHR₉)N(R)₂, —OC(O)N(R)₂, —N(R)C(O)OR, heteroaryl or heterocycloalkyl; M and M′ are independently selected from —C(O)O—, —OC(O)—, —OC(O)-M″-C(O)O—, —C(O)N(R′)—, —P(O)(OR′)O—, —S—S—, an aryl group, and a heteroaryl group; and R₂ and R₃ are independently selected from the group consisting of H, C₁₋₁₄ alkyl, and C₂₋₁₄ alkenyl. For example, m is 5, 7, or 9. For example, Q is OH, —NHC(S)N(R)₂, or —NHC(O)N(R)₂. For example, Q is —N(R)C(O)R, or —N(R)S(O)₂R.

[0466] In certain embodiments, a subset of compounds of Formula (I) includes those of Formula (IB):

[chemical structure]

or its N-oxide, or a salt or isomer thereof in which all variables are as defined herein. For example, m is selected from 5, 6, 7, 8, and 9; R₄ is hydrogen, unsubstituted C₁₋₃ alkyl, or —(CH₂)ₙQ, in which Q is OH, —NHC(S)N(R)₂, —NHC(O)N(R)₂, —N(R)C(O)R, —N(R)S(O)₂R, —N(R)R₈, —NHC(═NR₉)N(R)₂, —NHC(═CHR₉)N(R)₂, —OC(O)N(R)₂, —N(R)C(O)OR, heteroaryl or heterocycloalkyl; M and M′ are independently selected from —C(O)O—, —OC(O)—, —OC(O)-M″-C(O)O—, —C(O)N(R′)—, —P(O)(OR′)O—, —S—S—, an aryl group, and a heteroaryl group; and R₂ and R₃ are independently selected from the group consisting of H, C₁₋₁₄ alkyl, and C₂₋₁₄ alkenyl. For example, m is 5, 7, or 9. For example, Q is OH, —NHC(S)N(R)₂, or —NHC(O)N(R)₂. For example, Q is —N(R)C(O)R, or —N(R)S(O)₂R.

[0467] In certain embodiments, a subset of compounds of Formula (I) includes those of Formula (II):

[chemical structure]

or its N-oxide, or a salt or isomer thereof, wherein 1 is selected from 1, 2, 3, 4, and 5; M₁ is a bond or M′; R₄ is hydrogen, unsubstituted C₁₋₃ alkyl, or —(CH₂)ₙQ, in which n is 2, 3, or 4, and Q is OH, —NHC(S)N(R)₂, —NHC(O)N(R)₂, —N(R)C(O)R, —N(R)S(O)₂R, —N(R)R₈, —NHC(═NR₉)N(R)₂, —NHC(═CHR₉)N(R)₂, —OC(O)N(R)₂, —N(R)C(O)OR, heteroaryl or heterocycloalkyl; M and M′ are independently selected from —C(O)O—, —OC(O)—, —OC(O)-M″-C(O)O—, —C(O)N(R′)—, —P(O)(OR′)O—, —S—S—, an aryl group, and a heteroaryl group; and R₂ and R₃ are independently selected from the group consisting of H, C₁₋₁₄ alkyl, and C₂₋₁₄ alkenyl.

[0468] In one embodiment, the compounds of Formula (I) are of Formula (IIa),

[chemical structure]

or their N-oxides, or salts or isomers thereof, wherein R₄ is as described herein.

[0469] In another embodiment, the compounds of Formula (I) are of Formula (IIb),

[chemical structure]

or their N-oxides, or salts or isomers thereof, wherein R₄ is as described herein.

[0470] In another embodiment, the compounds of Formula (I) are of Formula (IIc) or (IIe):

[chemical structure]

or their N-oxides, or salts or isomers thereof, wherein R₄ is as described herein.

[0471] In another embodiment, the compounds of Formula (I) are of Formula (IIf):

[chemical structure]

or their N-oxides, or salts or isomers thereof, wherein M is —C(O)O— or —OC(O)—, M″ is C₁₋₆ alkyl or C₂₋₆ alkenyl, R₂ and R₃ are independently selected from the group consisting of C₅₋₁₄ alkyl and C₅₋₁₄ alkenyl, and n is selected from 2, 3, and 4.

[0472] In a further embodiment, the compounds of Formula (I) are of Formula (IId),

[chemical structure]

or their N-oxides, or salts or isomers thereof, wherein n is 2, 3, or 4; and m, R′, R″, and R₂ through R₆ are as described herein. For example, each of R₂ and R₃ may be independently selected from the group consisting of C₅₋₁₄ alkyl and C₅₋₁₄ alkenyl.

[0473] In a further embodiment, the compounds of Formula (I) are of Formula (IIg),

[chemical structure]

or their N-oxides, or salts or isomers thereof, wherein 1 is selected from 1, 2, 3, 4, and 5; m is selected from 5, 6, 7, 8, and 9; M₁ is a bond or M′; M and M′ are independently selected from —C(O)O—, —OC(O)—, —OC(O)-M″-C(O)O—, —C(O)N(R′)—, —P(O)(OR′)O—, —S—S—, an aryl group, and a heteroaryl group; and R₂ and R₃ are independently selected from the group consisting of H, C₁₋₁₄ alkyl, and C₂₋₁₄ alkenyl. For example, M″ is C₁₋₆ alkyl (e.g., C₁₋₄ alkyl) or C₂₋₆ alkenyl (e.g. C₂₋₄ alkenyl). For example, R₂ and R₃ are independently selected from the group consisting of C₅₋₁₄ alkyl and C₅₋₁₄ alkenyl.

[0474] In some embodiments, the ionizable lipids are one or more of the compounds described in U.S. Application Nos. 62/220,091, 62/252,316, 62/253,433, 62/266,460, 62/333,557, 62/382,740, 62/393,940, 62/471,937, 62/471,949, 62/475,140, and 62/475,166, and PCT Application No. PCT/US2016/052352.

[0475] In some embodiments, the ionizable lipids are selected from Compounds 1-280 described in U.S. Application No. 62/475,166.

[0476] In some embodiments, the ionizable lipid is

[chemical structure]

or a salt thereof.

[0477] In some embodiments, the ionizable lipid is

[chemical structure]

or a salt thereof.

[0478] In some embodiments, the ionizable lipid is

[chemical structure]

or a salt thereof.

[0479] In some embodiments, the ionizable lipid is

[chemical structure]

or a salt thereof.

[0480] The central amine moiety of a lipid according to Formula (I), (IA), (IB), (II), (IIa), (IIb), (IIc), (IId), (IIe), (IIf), or (IIg) may be protonated at a physiological pH. Thus, a lipid may have a positive or partial positive charge at physiological pH. Such lipids may be referred to as cationic or ionizable (amino)lipids. Lipids may also be zwitterionic, i.e., neutral molecules having both a positive and a negative charge.

[0481] In some aspects, the ionizable lipids of the present disclosure may be one or more of compounds of formula (III),

[chemical structure]

or salts or isomers thereof, wherein

### W is

[chemical structure]

ring A is

[chemical structure]

[0483] t is 1 or 2;

[0484] A₁ and A₂ are each independently selected from CH or N;

[0485] Z is CH₂ or absent wherein when Z is CH₂, the dashed lines (1) and (2) each represent a single bond; and when Z is absent, the dashed lines (1) and (2) are both absent;

[0486] R₁, R₂, R₃, R₄, and R₅ are independently selected from the group consisting of C₅₋₂₀ alkyl, C₅₋₂₀ alkenyl, —R″MR′, —R*YR″, —YR″, and —R*OR″;

[0487] R_{X1} and R_{X2} are each independently H or C₁₋₃ alkyl;

[0488] each M is independently selected from the group consisting of —C(O)O—, —OC(O)—, —OC(O)O—, —C(O)N(R′)—, —N(R′)C(O)—, —C(O)—, —C(S)—, —C(S)S—, —SC(S)—, —CH(OH)—, —P(O)(OR′)O—, —S(O)₂—, —C(O)S—, —SC(O)—, an aryl group, and a heteroaryl group; M* is C₁-C₆ alkyl,

[0489] W¹ and W² are each independently selected from the group consisting of —O— and —N(R₆)—;

[0490] each R₆ is independently selected from the group consisting of H and C₁₋₅ alkyl;

[0491] X¹, X², and X³ are independently selected from the group consisting of a bond, —CH₂—, —(CH₂)₂—, —CHR—, —CHY—, —C(O)—, —C(O)O—, —OC(O)—, —(CH₂)ₙ—C(O)—, —C(O)—(CH₂)ₙ—, —(CH₂)ₙ—C(O)O—, —OC(O)—(CH₂)ₙ—, —(CH₂)ₙ—OC(O)—, —C(O)O—(CH₂)ₙ—, —CH(OH)—, —C(S)—, and —CH(SH)—;

[0492] each Y is independently a C₃₋₆ carbocycle;

[0493] each R* is independently selected from the group consisting of C₁₋₁₂ alkyl and C₂₋₁₂ alkenyl;

[0494] each R is independently selected from the group consisting of C₁₋₃ alkyl and a C₃₋₆ carbocycle;

[0495] each R′ is independently selected from the group consisting of C₁₋₁₂ alkyl, C₂₋₁₂ alkenyl, and H;

[0496] each R″ is independently selected from the group consisting of C₃₋₁₂ alkyl, C₃₋₁₂ alkenyl and —R*MR′; and

[0497] n is an integer from 1-6;

when ring A is

[chemical structure]

then

[0498] at least one of X¹, X², and X³ is not —CH₂—; and/or

[0499] at least one of R₁, R₂, R₃, R₄, and R₅ is —R″MR′.

[0500] In some embodiments, the compound is of any of formulae (IIIa1)-(IIIa8):

[chemical structure]

[0501] In some embodiments, the ionizable lipids are one or more of the compounds described in U.S. Application Nos. 62/271,146, 62/338,474, 62/413,345, and 62/519,826, and PCT Application No. PCT/US2016/068300.

[0502] In some embodiments, the ionizable lipids are selected from Compounds 1-156 described in U.S. Application No. 62/519,826.

[0503] In some embodiments, the ionizable lipids are selected from Compounds 1-16, 42-66, 68-76, and 78-156 described in U.S. Application No. 62/519,826.

[0504] In some embodiments, the ionizable lipid is

[chemical structure]

or a salt thereof.

[0505] In some embodiments, the ionizable lipid is

[chemical structure]

or a salt thereof.

[0506] The central amine moiety of a lipid according to Formula (III), (IIIa1), (IIIa2), (IIIa3), (IIIa4), (IIIa5), (IIIa6), (IIIa7), or (IIIa8) may be protonated at a physiological pH. Thus, a lipid may have a positive or partial positive charge at physiological pH. Such lipids may be referred to as cationic or ionizable (amino)lipids. Lipids may also be zwitterionic, i.e., neutral molecules having both a positive and a negative charge.

### Phospholipids

[0507] The lipid composition of the lipid nanoparticle composition disclosed herein can comprise one or more phospholipids, for example, one or more saturated or (poly)unsaturated phospholipids or a combination thereof. In general, phospholipids comprise a phospholipid moiety and one or more fatty acid moieties.

[0508] A phospholipid moiety can be selected, for example, from the non-limiting group consisting of phosphatidyl choline, phosphatidyl ethanolamine, phosphatidyl glycerol, phosphatidyl serine, phosphatidic acid, 2-lysophosphatidyl choline, and a sphingomyelin. A fatty acid moiety can be selected, for example, from the non-limiting group consisting of lauric acid, myristic acid, myristoleic acid, palmitic acid, palmitoleic acid, stearic acid, oleic acid, linoleic acid, alpha-linolenic acid, erucic acid, phytanoic acid, arachidic acid, arachidonic acid, eicosapentaenoic acid, behenic acid, docosapentaenoic acid, and docosahexaenoic acid.

[0509] Particular phospholipids can facilitate fusion to a membrane. For example, a cationic phospholipid can interact with one or more negatively charged phospholipids of a membrane (e.g., a cellular or intracellular membrane). Fusion of a phospholipid to a membrane can allow one or more elements (e.g., a therapeutic agent) of a lipid-containing composition (e.g., LNPs) to pass through the membrane permitting, e.g., delivery of the one or more elements to a target tissue.

[0510] Non-natural phospholipid species including natural species with modifications and substitutions including branching, oxidation, cyclization, and alkynes are also contemplated. For example, a phospholipid can be functionalized with or cross-linked to one or more alkynes (e.g., an alkenyl group in which one or more double bonds is replaced with a triple bond). Under appropriate reaction conditions, an alkyne group can undergo a copper-catalyzed cycloaddition upon exposure to an azide. Such reactions can be useful in functionalizing a lipid bilayer of a nanoparticle composition to facilitate membrane permeation or cellular recognition or in conjugating a nanoparticle composition to a useful component such as a targeting or imaging moiety (e.g., a dye).

[0511] Phospholipids include, but are not limited to, glycerophospholipids such as phosphatidylcholines, phosphatidylethanolamines, phosphatidylserines, phosphatidylinositols, phosphatidy glycerols, and phosphatidic acids. Phospholipids also include phosphosphingolipid, such as sphingomyelin.

[0512] In some embodiments, a phospholipid of the invention comprises 1,2-distearoyl-sn-glycero-3-phosphocholine (DSPC), 1,2-dioleoyl-sn-glycero-3-phosphoethanolamine (DOPE), 1,2-dilinoleoyl-sn-glycero-3-phosphocholine (DLPC), 1,2-dimyristoyl-sn-gly cero-phosphocholine (DMPC), 1,2-dioleoyl-sn-glycero-3-phosphocholine (DOPC), 1,2-dipalmitoyl-sn-glycero-3-phosphocholine (DPPC), 1,2-diundecanoyl-sn-glycero-phosphocholine (DUPC), 1-palmitoyl-2-oleoyl-sn-glycero-3-phosphocholine (POPC), 1,2-di-O-octadecenyl-sn-glycero-3-phosphocholine (18:0 Diether PC), 1-oleoyl-2 cholesterylhemisuccinoyl-sn-glycero-3-phosphocholine (OChemsPC), 1-hexadecyl-sn-glycero-3-phosphocholine (C16 Lyso PC), 1,2-dilinolenoyl-sn-glycero-3-phosphocholine,1,2-diarachidonoyl-sn-glycero-3-phosphocholine, 1,2-didocosahexaenoyl-sn-glycero-3-phosphocholine, 1,2-diphytanoyl-sn-glycero-3-phosphoethanolamine (ME 16.0 PE), 1,2-distearoyl-sn-glycero-3-phosphoethanolamine, 1,2-dilinoleoyl-sn-glycero-3-phosphoethanolamine, 1,2-dilinolenoyl-sn-glycero-3-phosphoethanolamine, 1,2-diarachidonoyl-sn-glycero-3-phosphoethanolamine, 1,2-didocosahexaenoyl-sn-glycero-3-phosphoethanolamine, 1,2-dioleoyl-sn-glycero-3-phospho-rac-(1-glycerol) sodium salt (DOPG), sphingomyelin, and mixtures thereof.

[0513] In certain embodiments, a phospholipid useful or potentially useful in the present invention is an analog or variant of DSPC. In certain embodiments, a phospholipid useful or potentially useful in the present invention is a compound of Formula (IV):

[chemical structure]

[0514] or a salt thereof, wherein:

[0515] each R¹ is independently optionally substituted alkyl; or optionally two R¹ are joined together with the intervening atoms to form optionally substituted monocyclic carbocyclyl or optionally substituted monocyclic heterocyclyl; or optionally three R¹ are joined together with the intervening atoms to form optionally substituted bicyclic carbocyclyl or optionally substitute bicyclic heterocyclyl;

[0516] n is 1, 2, 3, 4, 5, 6, 7, 8, 9, or 10;

[0517] m is 0, 1, 2, 3, 4, 5, 6, 7, 8, 9, or 10;

[0518] A is of the formula:

[chemical structure]

[0519] each instance of L² is independently a bond or optionally substituted C₁₋₆ alkylene, wherein one methylene unit of the optionally substituted C₁₋₆ alkylene is optionally replaced with O, N(R^{N}), S, C(O), C(O)N(R^{N}), NR^{N}C(O), C(O)O, OC(O), OC(O)O, OC(O)N(R^{N}), —NR^{N}C(O)O, or NR^{N}C(O)N(R^{N});

[0520] each instance of R² is independently optionally substituted C₁₋₃₀ alkyl, optionally substituted C₁₋₃₀ alkenyl, or optionally substituted C₁₋₃₀ alkynyl; optionally wherein one or more methylene units of R² are independently replaced with optionally substituted carbocyclylene, optionally substituted heterocyclylene, optionally substituted arylene, optionally substituted heteroarylene, N(R^{N}), O, S, C(O), C(O)N(R^{N}), NR^{N}C(O), —NR^{N}C(O)N(R^{N}), C(O)O, OC(O), OC(O)O, OC(O)N(R^{N}), NR^{N}C(O)O, C(O)S, SC(O), —C(═NR^{N}), C(═NR^{N})N(R^{N}), NR^{N}C(═NR^{N}), NR^{N}C(═NR^{N})N(R^{N}), C(S), C(S)N(R^{N}), NR^{N}C(S), NR^{N}C(S)N(R^{N}), S(O), OS(O), S(O)O, OS(O)O, OS(O)₂, S(O)₂O, OS(O)₂O, N(R^{N})S(O), —S(O)N(R^{N}), N(R^{N})S(O)N(R^{N}), OS(O)N(R^{N}), N(R^{N})S(O)O, S(O)₂, N(R^{N})S(O)₂, S(O)₂N(R^{N}), N(R^{N})S(O)₂N(R^{N}), OS(O)₂N(R^{N}), or N(R^{N})S(O)₂O;

[0521] each instance of R^{N} is independently hydrogen, optionally substituted alkyl, or a nitrogen protecting group;

[0522] Ring B is optionally substituted carbocyclyl, optionally substituted heterocyclyl, optionally substituted aryl, or optionally substituted heteroaryl; and

[0523] p is 1 or 2;

[0524] provided that the compound is not of the formula:

[chemical structure]

[0525] wherein each instance of R² is independently unsubstituted alkyl, unsubstituted alkenyl, or unsubstituted alkynyl.

[0526] In some embodiments, the phospholipids may be one or more of the phospholipids described in U.S. Application No. 62/520,530.

### Phospholipid Head Modifications

[0527] In certain embodiments, a phospholipid useful or potentially useful in the present invention comprises a modified phospholipid head (e.g., a modified choline group). In certain embodiments, a phospholipid with a modified head is DSPC, or analog thereof, with a modified quaternary amine. For example, in embodiments of Formula (IV), at least one of R¹ is not methyl. In certain embodiments, at least one of R¹ is not hydrogen or methyl. In certain embodiments, the compound of Formula (IV) is of one of the following formulae:

[chemical structure]

[0528] or a salt thereof, wherein:

[0529] each t is independently 1, 2, 3, 4, 5, 6, 7, 8, 9, or 10;

[0530] each u is independently 0, 1, 2, 3, 4, 5, 6, 7, 8, 9, or 10; and

[0531] each v is independently 1, 2, or 3.

[0532] In certain embodiments, a compound of Formula (IV) is of Formula (IV-a):

[chemical structure]

[0533] or a salt thereof.

[0534] In certain embodiments, a phospholipid useful or potentially useful in the present invention comprises a cyclic moiety in place of the glyceride moiety. In certain embodiments, a phospholipid useful in the present invention is DSPC, or analog thereof, with a cyclic moiety in place of the glyceride moiety. In certain embodiments, the compound of Formula (IV) is of Formula (IV-b):

[chemical structure]

or a salt thereof.

### Phospholipid Tail Modifications

[0535] In certain embodiments, a phospholipid useful or potentially useful in the present invention comprises a modified tail. In certain embodiments, a phospholipid useful or potentially useful in the present invention is DSPC, or analog thereof, with a modified tail. As described herein, a “modified tail” may be a tail with shorter or longer aliphatic chains, aliphatic chains with branching introduced, aliphatic chains with substituents introduced, aliphatic chains wherein one or more methylenes are replaced by cyclic or heteroatom groups, or any combination thereof. For example, in certain embodiments, the compound of (IV) is of Formula (IV-a), or a salt thereof, wherein at least one instance of R² is each instance of R² is optionally substituted C₁₋₃₀ alkyl, wherein one or more methylene units of R² are independently replaced with optionally substituted carbocyclylene, optionally substituted heterocyclylene, optionally substituted arylene, optionally substituted heteroarylene, N(R^{N}), O, S, C(O), C(O)N(R^{N}), NR^{N}C(O), NR^{N}C(O)N(R^{N}), C(O)O, OC(O), OC(O)O, OC(O)N(R^{N}), NR^{N}C(O)O, C(O)S, SC(O), C(═NR^{N}), C(═NR^{N})N(R^{N}), NR^{N}C(═NR^{N}), NR^{N}C(NR^{N})N(R^{N}), C(S), C(S)N(R^{N}), NR^{N}C(S), NR^{N}C(S)N(R^{N}), S(O), OS(O), S(O)O, OS(O)O, OS(O)₂, —S(O)₂O, OS(O)₂O, N(R^{N})S(O), S(O)N(R^{N}), N(R^{N})S(O)N(R^{N}), OS(O)N(R^{N}), N(R^{N})S(O)O, S(O)₂, N(R^{N})S(O)₂, S(O)₂N(R^{N}), N(R^{N})S(O)₂N(R^{N}), OS(O)₂N(R^{N}), or N(R^{N})S(O)₂O.

[0536] In certain embodiments, the compound of Formula (IV) is of Formula (IV-c):

[chemical structure]

[0537] or a salt thereof, wherein:

[0538] each x is independently an integer between 0-30, inclusive; and

[0539] each instance is G is independently selected from the group consisting of optionally substituted carbocyclylene, optionally substituted heterocyclylene, optionally substituted arylene, optionally substituted heteroarylene, N(R^{N}), O, S, C(O), C(O)N(R^{N}), NR^{N}C(O), —NR^{N}C(O)N(R^{N}), C(O)O, OC(O), OC(O)O, OC(O)N(R^{N}), NR^{N}C(O)O, C(O)S, SC(O), —C(═NR^{N}), C(═NR^{N})N(R^{N}), NR^{N}C(═NR^{N}), NR^{N}C(═NR^{N})N(R^{N}), C(S), C(S)N(R^{N}), NR^{N}C(S), NR^{N}C(s)N(R^{N}), S(O), OS(O), S(O)O, OS(O)O, OS(O)₂, S(O)₂O, OS(O)₂O, N(R^{N})S(O), —S(O)N(R^{N}), N(R^{N})S(O)N(R^{N}), OS(O)N(R^{N}), N(R^{N})S(O)O, S(O)₂, N(R^{N})S(O)₂, S(O)₂N(R^{N}), N(R^{N})S(O)₂N(R^{N}), OS(O)₂N(R^{N}), or N(R^{N})S(O)₂O. Each possibility represents a separate embodiment of the present invention.

[0540] In certain embodiments, a phospholipid useful or potentially useful in the present invention comprises a modified phosphocholine moiety, wherein the alkyl chain linking the quaternary amine to the phosphoryl group is not ethylene (e.g., n is not 2). Therefore, in certain embodiments, a phospholipid useful or potentially useful in the present invention is a compound of Formula (IV), wherein n is 1, 3, 4, 5, 6, 7, 8, 9, or 10. For example, in certain embodiments, a compound of Formula (IV) is of one of the following formulae:

[chemical structure]

or a salt thereof.

### Alternative Lipids

[0541] In certain embodiments, a phospholipid useful or potentially useful in the present invention comprises a modified phosphocholine moiety, wherein the alkyl chain linking the quaternary amine to the phosphoryl group is not ethylene (e.g., n is not 2). Therefore, in certain embodiments, a phospholipid useful.

[0542] In certain embodiments, an alternative lipid is used in place of a phospholipid of the present disclosure.

[0543] In certain embodiments, an alternative lipid of the invention is oleic acid.

[0544] In certain embodiments, the alternative lipid is one of the following:

[chemical structure]

### Structural Lipids

[0545] The lipid composition of a pharmaceutical composition disclosed herein can comprise one or more structural lipids. As used herein, the term “structural lipid” refers to sterols and also to lipids containing sterol moieties.

[0546] Incorporation of structural lipids in the lipid nanoparticle may help mitigate aggregation of other lipids in the particle. Structural lipids can be selected from the group including but not limited to, cholesterol, fecosterol, sitosterol, ergosterol, campesterol, stigmasterol, brassicasterol, tomatidine, tomatine, ursolic acid, alpha-tocopherol, hopanoids, phytosterols, steroids, and mixtures thereof. In some embodiments, the structural lipid is a sterol. As defined herein, “sterols” are a subgroup of steroids consisting of steroid alcohols. In certain embodiments, the structural lipid is a steroid. In certain embodiments, the structural lipid is cholesterol. In certain embodiments, the structural lipid is an analog of cholesterol. In certain embodiments, the structural lipid is alpha-tocopherol.

[0547] In some embodiments, the structural lipids may be one or more of the structural lipids described in U.S. Application No. 62/520,530.

### Polyethylene Glycol (PEG)-Lipids

[0548] The lipid composition of a pharmaceutical composition disclosed herein can comprise one or more a polyethylene glycol (PEG) lipid.

[0549] As used herein, the term “PEG-lipid” refers to polyethylene glycol (PEG)-modified lipids. Non-limiting examples of PEG-lipids include PEG-modified phosphatidylethanolamine and phosphatidic acid, PEG-ceramide conjugates (e.g., PEG-CerC14 or PEG-CerC20), PEG-modified dialkylamines and PEG-modified 1,2-diacyloxypropan-3-amines. Such lipids are also referred to as PEGylated lipids. For example, a PEG lipid can be PEG-c-DOMG, PEG-DMG, PEG-DLPE, PEG-DMPE, PEG-DPPC, or a PEG-DSPE lipid.

[0550] In some embodiments, the PEG-lipid includes, but not limited to 1,2-dimyristoyl-sn-glycerol methoxypolyethylene glycol (PEG-DMG), 1,2-distearoyl-sn-glycero-3-phosphoethanolamine-N-[amino(polyethylene glycol)] (PEG-DSPE), PEG-disteryl glycerol (PEG-DSG), PEG-dipalmetoleyl, PEG-dioleyl, PEG-distearyl, PEG-diacylglycamide (PEG-DAG), PEG-dipalmitoyl phosphatidylethanolamine (PEG-DPPE), or PEG-1,2-dimyristyloxlpropyl-3-amine (PEG-c-DMA).

[0551] In one embodiment, the PEG-lipid is selected from the group consisting of a PEG-modified phosphatidylethanolamine, a PEG-modified phosphatidic acid, a PEG-modified ceramide, a PEG-modified dialkylamine, a PEG-modified diacylglycerol, a PEG-modified dialkylglycerol, and mixtures thereof.

[0552] In some embodiments, the lipid moiety of the PEG-lipids includes those having lengths of from about C₁₄ to about C₂₂, preferably from about C₁₄ to about C₁₆. In some embodiments, a PEG moiety, for example an mPEG-NH₂, has a size of about 1000, 2000, 5000, 10,000, 15,000 or 20,000 daltons. In one embodiment, the PEG-lipid is PEG₂ₖ-DMG. In one embodiment, the lipid nanoparticles described herein can comprise a PEG lipid which is a non-diffusible PEG. Non-limiting examples of non-diffusible PEGs include PEG-DSG and PEG-DSPE.

[0553] PEG-lipids are known in the art, such as those described in U.S. Pat. No. 8,158,601 and International Publ. No. WO 2015/130584 A2, which are incorporated herein by reference in their entirety.

[0554] In general, some of the other lipid components (e.g., PEG lipids) of various formulae, described herein may be synthesized as described International Patent Application No. PCT/US2016/000129, filed Dec. 10, 2016, entitled “Compositions and Methods for Delivery of Therapeutic Agents,” which is incorporated by reference in its entirety.

[0555] The lipid component of a lipid nanoparticle composition may include one or more molecules comprising polyethylene glycol, such as PEG or PEG-modified lipids. Such species may be alternately referred to as PEGylated lipids. A PEG lipid is a lipid modified with polyethylene glycol. A PEG lipid may be selected from the non-limiting group including PEG-modified phosphatidylethanolamines, PEG-modified phosphatidic acids, PEG-modified ceramides, PEG-modified dialkylamines, PEG-modified diacylglycerols, PEG-modified dialkylglycerols, and mixtures thereof. For example, a PEG lipid may be PEG-c-DOMG, PEG-DMG, PEG-DLPE, PEG-DMPE, PEG-DPPC, or a PEG-DSPE lipid.

[0556] In some embodiments the PEG-modified lipids are a modified form of PEG DMG. PEG-DMG has the following structure:

[chemical structure]

[0557] In one embodiment, PEG lipids useful in the present invention can be PEGylated lipids described in International Publication No. WO2012099755, the contents of which is herein incorporated by reference in its entirety. Any of these exemplary PEG lipids described herein may be modified to comprise a hydroxyl group on the PEG chain. In certain embodiments, the PEG lipid is a PEG-OH lipid. As generally defined herein, a “PEG-OH lipid” (also referred to herein as “hydroxy-PEGylated lipid”) is a PEGylated lipid having one or more hydroxyl (—OH) groups on the lipid. In certain embodiments, the PEG-OH lipid includes one or more hydroxyl groups on the PEG chain. In certain embodiments, a PEG-OH or hydroxy-PEGylated lipid comprises an —OH group at the terminus of the PEG chain. Each possibility represents a separate embodiment of the present invention.

[0558] In certain embodiments, a PEG lipid useful in the present invention is a compound of Formula (V). Provided herein are compounds of Formula (V):

[chemical structure]

[0559] or salts thereof, wherein:

[0560] R³ is —OR^{O};

[0561] R^{O} is hydrogen, optionally substituted alkyl, or an oxygen protecting group;

[0562] r is an integer between 1 and 100, inclusive;

[0563] L¹ is optionally substituted C₁₋₁₀ alkylene, wherein at least one methylene of the optionally substituted C₁₋₁₀ alkylene is independently replaced with optionally substituted carbocyclylene, optionally substituted heterocyclylene, optionally substituted arylene, optionally substituted heteroarylene, O, N(R^{N}), S, C(O), C(O)N(R^{N}), NR^{N}C(O), C(O)O, —OC(O), OC(O)O, OC(O)N(R^{N}), NR^{N}C(O)O, or NR^{N}C(O)N(R^{N});

[0564] D is a moiety obtained by click chemistry or a moiety cleavable under physiological conditions;

[0565] m is 0, 1, 2, 3, 4, 5, 6, 7, 8, 9, or 10;

[0566] A is of the formula:

[chemical structure]

[0567] each instance of L² is independently a bond or optionally substituted C₁₋₆ alkylene, wherein one methylene unit of the optionally substituted C₁₋₆ alkylene is optionally replaced with O, N(R^{N}), S, C(O), C(O)N(R^{N}), NR^{N}C(O), C(O)O, OC(O), OC(O)O, OC(O)N(R^{N}), —NR^{N}C(O)O, or NR^{N}C(O)N(R^{N});

[0568] each instance of R² is independently optionally substituted C₁₋₃₀ alkyl, optionally substituted C₁₋₃₀ alkenyl, or optionally substituted C₁₋₃₀ alkynyl; optionally wherein one or more methylene units of R² are independently replaced with optionally substituted carbocyclylene, optionally substituted heterocyclylene, optionally substituted arylene, optionally substituted heteroarylene, N(R^{N}), O, S, C(O), C(O)N(R^{N}), NR^{N}C(O), —NR^{N}C(O)N(R^{N}), C(O)O, OC(O), OC(O)O, OC(O)N(R^{N}), NR^{N}C(O)O, C(O)S, SC(O), —C(═NR^{N}), C(═NR^{N})N(R^{N}), NR^{N}C(═NR^{N}), NR^{N}C(═NR^{N})N(R^{N}), C(S), C(S)N(R^{N}), NR^{N}C(S), NR^{N}C(S)N(R^{N}), S(O), OS(O), S(O)O, OS(O)O, OS(O)₂, S(O)₂O, OS(O)₂O, N(R^{N})S(O), —S(O)N(R^{N}), N(R^{N})S(O)N(R^{N}), OS(O)N(R^{N}), N(R^{N})S(O)O, S(O)₂, N(R^{N})S(O)₂, S(O)₂N(R^{N}), N(R^{N})S(O)₂N(R^{N}), OS(O)₂N(R^{N}), or N(R^{N})S(O)₂O;

[0569] each instance of R^{N} is independently hydrogen, optionally substituted alkyl, or a nitrogen protecting group;

[0570] Ring B is optionally substituted carbocyclyl, optionally substituted heterocyclyl, optionally substituted aryl, or optionally substituted heteroaryl; and

[0571] p is 1 or 2.

[0572] In certain embodiments, the compound of Fomula (V) is a PEG-OH lipid (i.e., R³ is —OR^{O}, and R^{O} is hydrogen). In certain embodiments, the compound of Formula (V) is of Formula (V-OH):

[chemical structure]

[0573] or a salt thereof.

[0574] In certain embodiments, a PEG lipid useful in the present invention is a PEGylated fatty acid. In certain embodiments, a PEG lipid useful in the present invention is a compound of Formula (VI). Provided herein are compounds of Formula (VI):

[chemical structure]

[0575] or a salts thereof, wherein:

[0576] R³ is —OR^{O};

[0577] R^{O} is hydrogen, optionally substituted alkyl or an oxygen protecting group;

[0578] r is an integer between 1 and 100, inclusive;

[0579] R⁵ is optionally substituted C₁₀₋₄₀ alkyl, optionally substituted C₁₀₋₄₀ alkenyl, or optionally substituted C₁₀₋₄₀ alkynyl; and optionally one or more methylene groups of R⁵ are replaced with optionally substituted carbocyclylene, optionally substituted heterocyclylene, optionally substituted arylene, optionally substituted heteroarylene, N(R^{N}), O, S, C(O), —C(O)N(R^{N}), NR^{N}C(O), NR^{N}C(O)N(R^{N}), C(O)O, OC(O), OC(O)O, OC(O)N(R^{N}), —NR^{N}C(O)O, C(O)S, SC(O), C(═NR^{N}), C(═NR^{N})N(R^{N}), NR^{N}C(═NR^{N}), NR^{N}C(═NR^{N})N(R^{N}), C(S), C(S)N(R^{N}), NR^{N}C(S), NR^{N}C(S)N(R^{N}), S(O), OS(O), S(O)O, OS(O)O, OS(O)₂, —S(O)₂O, OS(O)₂O, N(R^{N})S(O), S(O)N(R^{N}), N(R^{N})S(O)N(R^{N}), OS(O)N(R^{N}), N(R^{N})S(O)O, S(O)₂, N(R^{N})S(O)₂, S(O)₂N(R^{N}), N(R^{N})S(O)₂N(R^{N}), OS(O)₂N(R^{N}), or N(R^{N})S(O)₂O; and

[0580] each instance of R^{N} is independently hydrogen, optionally substituted alkyl, or a nitrogen protecting group.

[0581] In certain embodiments, the compound of Formula (VI) is of Formula (VI-OH):

[chemical structure]

[0582] or a salt thereof. In some embodiments, r is 45.

[0583] In yet other embodiments the compound of Formula (VI) is:

[chemical structure]

or a salt thereof.

[0584] In one embodiment, the compound of Formula (VI) is

[chemical structure]

[0585] In some aspects, the lipid composition of the pharmaceutical compositions disclosed herein does not comprise a PEG-lipid.

[0586] In some embodiments, the PEG-lipids may be one or more of the PEG lipids described in U.S. Application No. 62/520,530.

[0587] In some embodiments, a PEG lipid of the invention comprises a PEG-modified phosphatidylethanolamine, a PEG-modified phosphatidic acid, a PEG-modified ceramide, a PEG-modified dialkylamine, a PEG-modified diacylglycerol, a PEG-modified dialkylglycerol, and mixtures thereof In some embodiments, the PEG-modified lipid is PEG-DMG, PEG-c-DOMG (also referred to as PEG-DOMG), PEG-DSG and/or PEG-DPG. In some embodiments, a LNP of the invention comprises an ionizable cationic lipid of any of Formula I, II or III, a phospholipid comprising DSPC, a structural lipid, and a PEG lipid comprising PEG-DMG.

[0588] In some embodiments, a LNP of the invention comprises an ionizable cationic lipid of any of Formula I, II or III, a phospholipid comprising DSPC, a structural lipid, and a PEG lipid comprising a compound having Formula VI.

[0589] In some embodiments, a LNP of the invention comprises an ionizable cationic lipid of Formula I, II or III, a phospholipid comprising a compound having Formula IV, a structural lipid, and the PEG lipid comprising a compound having Formula V or VI.

[0590] In some embodiments, a LNP of the invention comprises an ionizable cationic lipid of Formula I, II or III, a phospholipid comprising a compound having Formula IV, a structural lipid, and the PEG lipid comprising a compound having Formula V or VI.

[0591] In some embodiments, a LNP of the invention comprises an ionizable cationic lipid of Formula I, II or III, a phospholipid having Formula IV, a structural lipid, and a PEG lipid comprising a compound having Formula VI.

[0592] In some embodiments, a LNP of the invention comprises an ionizable cationic lipid of

[chemical structure]

and a PEG lipid comprising Formula VI.

[0593] In some embodiments, a LNP of the invention comprises an ionizable cationic lipid of

[chemical structure]

and an alternative lipid comprising oleic acid.

[0594] In some embodiments, a LNP of the invention comprises an ionizable cationic lipid of

[chemical structure]

an alternative lipid comprising oleic acid, a structural lipid comprising cholesterol, and a PEG lipid comprising a compound having Formula VI.

[0595] In some embodiments, a LNP of the invention comprises an ionizable cationic lipid of

[chemical structure]

a phospholipid comprising DOPE, a structural lipid comprising cholesterol, and a PEG lipid comprising a compound having Formula VI.

[0596] In some embodiments, a LNP of the invention comprises an ionizable cationic lipid of

[chemical structure]

a phospholipid comprising DOPE, a structural lipid comprising cholesterol, and a PEG lipid comprising a compound having Formula VII.

[0597] In some embodiments, a LNP of the invention comprises an N:P ratio of from about 2:1 to about 30:1.

[0598] In some embodiments, a LNP of the invention comprises an N:P ratio of about 6:1.

[0599] In some embodiments, a LNP of the invention comprises an N:P ratio of about 3:1.

[0600] In some embodiments, a LNP of the invention comprises a wt/wt ratio of the ionizable cationic lipid component to the RNA of from about 10:1 to about 100:1.

[0601] In some embodiments, a LNP of the invention comprises a wt/wt ratio of the ionizable cationic lipid component to the RNA of about 20:1.

[0602] In some embodiments, a LNP of the invention comprises a wt/wt ratio of the ionizable cationic lipid component to the RNA of about 10:1.

[0603] In some embodiments, a LNP of the invention has a mean diameter from about 50 nm to about 150 nm.

[0604] In some embodiments, a LNP of the invention has a mean diameter from about 70 nm to about 120 nm.

[0605] As used herein, the term “alkyl”, “alkyl group”, or “alkylene” means a linear or branched, saturated hydrocarbon including one or more carbon atoms (e.g., one, two, three, four, five, six, seven, eight, nine, ten, eleven, twelve, thirteen, fourteen, fifteen, sixteen, seventeen, eighteen, nineteen, twenty, or more carbon atoms), which is optionally substituted. The notation “C1-14 alkyl” means an optionally substituted linear or branched, saturated hydrocarbon including 1-14 carbon atoms. Unless otherwise specified, an alkyl group described herein refers to both unsubstituted and substituted alkyl groups.

[0606] As used herein, the term “alkenyl”, “alkenyl group”, or “alkenylene” means a linear or branched hydrocarbon including two or more carbon atoms (e.g., two, three, four, five, six, seven, eight, nine, ten, eleven, twelve, thirteen, fourteen, fifteen, sixteen, seventeen, eighteen, nineteen, twenty, or more carbon atoms) and at least one double bond, which is optionally substituted. The notation “C2-14 alkenyl” means an optionally substituted linear or branched hydrocarbon including 2-14 carbon atoms and at least one carbon-carbon double bond. An alkenyl group may include one, two, three, four, or more carbon-carbon double bonds. For example, C18 alkenyl may include one or more double bonds. A C18 alkenyl group including two double bonds may be a linoleyl group. Unless otherwise specified, an alkenyl group described herein refers to both unsubstituted and substituted alkenyl groups.

[0607] As used herein, the term “alkynyl”, “alkynyl group”, or “alkynylene” means a linear or branched hydrocarbon including two or more carbon atoms (e.g., two, three, four, five, six, seven, eight, nine, ten, eleven, twelve, thirteen, fourteen, fifteen, sixteen, seventeen, eighteen, nineteen, twenty, or more carbon atoms) and at least one carbon-carbon triple bond, which is optionally substituted. The notation “C2-14 alkynyl” means an optionally substituted linear or branched hydrocarbon including 2-14 carbon atoms and at least one carbon-carbon triple bond. An alkynyl group may include one, two, three, four, or more carbon-carbon triple bonds. For example, C18 alkynyl may include one or more carbon-carbon triple bonds. Unless otherwise specified, an alkynyl group described herein refers to both unsubstituted and substituted alkynyl groups.

[0608] As used herein, the term “carbocycle” or “carbocyclic group” means an optionally substituted mono- or multi-cyclic system including one or more rings of carbon atoms. Rings may be three, four, five, six, seven, eight, nine, ten, eleven, twelve, thirteen, fourteen, fifteen, sixteen, seventeen, eighteen, nineteen, or twenty membered rings. The notation “C3-6 carbocycle” means a carbocycle including a single ring having 3-6 carbon atoms. Carbocycles may include one or more carbon-carbon double or triple bonds and may be non-aromatic or aromatic (e.g., cycloalkyl or aryl groups). Examples of carbocycles include cyclopropyl, cyclopentyl, cyclohexyl, phenyl, naphthyl, and 1,2 dihydronaphthyl groups. The term “cycloalkyl” as used herein means a non-aromatic carbocycle and may or may not include any double or triple bond. Unless otherwise specified, carbocycles described herein refers to both unsubstituted and substituted carbocycle groups, i.e., optionally substituted carbocycles.

[0609] As used herein, the term “heterocycle” or “heterocyclic group” means an optionally substituted mono- or multi-cyclic system including one or more rings, where at least one ring includes at least one heteroatom. Heteroatoms may be, for example, nitrogen, oxygen, or sulfur atoms. Rings may be three, four, five, six, seven, eight, nine, ten, eleven, twelve, thirteen, or fourteen membered rings. Heterocycles may include one or more double or triple bonds and may be non-aromatic or aromatic (e.g., heterocycloalkyl or heteroaryl groups). Examples of heterocycles include imidazolyl, imidazolidinyl, oxazolyl, oxazolidinyl, thiazolyl, thiazolidinyl, pyrazolidinyl, pyrazolyl, isoxazolidinyl, isoxazolyl, isothiazolidinyl, isothiazolyl, morpholinyl, pyrrolyl, pyrrolidinyl, furyl, tetrahydrofuryl, thiophenyl, pyridinyl, piperidinyl, quinolyl, and isoquinolyl groups. The term “heterocycloalkyl” as used herein means a non-aromatic heterocycle and may or may not include any double or triple bond. Unless otherwise specified, heterocycles described herein refers to both unsubstituted and substituted heterocycle groups, i.e., optionally substituted heterocycles.

[0610] As used herein, the term “heteroalkyl”, “heteroalkenyl”, or “heteroalkynyl”, refers respectively to an alkyl, alkenyl, alkynyl group, as defined herein, which further comprises one or more (e.g., 1, 2, 3, or 4) heteroatoms (e.g., oxygen, sulfur, nitrogen, boron, silicon, phosphorus) wherein the one or more heteroatoms is inserted between adjacent carbon atoms within the parent carbon chain and/or one or more heteroatoms is inserted between a carbon atom and the parent molecule, i.e., between the point of attachment. Unless otherwise specified, heteroalkyls, heteroalkenyls, or heteroalkynyls described herein refers to both unsubstituted and substituted heteroalkyls, heteroalkenyls, or heteroalkynyls, i.e., optionally substituted heteroalkyl s, heteroalkenyl s, or heteroalkynyl s.

[0611] As used herein, a “biodegradable group” is a group that may facilitate faster metabolism of a lipid in a mammalian entity. A biodegradable group may be selected from the group consisting of, but is not limited to, —C(O)O—, —OC(O)—, —C(O)N(R′)—, —N(R′)C(O)—, —C(O)—, —C(S)—, —C(S)S—, —SC(S)—, —CH(OH)—, —P(O)(OR′)O—, —S(O)2-, an aryl group, and a heteroaryl group. As used herein, an “aryl group” is an optionally substituted carbocyclic group including one or more aromatic rings. Examples of aryl groups include phenyl and naphthyl groups. As used herein, a “heteroaryl group” is an optionally substituted heterocyclic group including one or more aromatic rings. Examples of heteroaryl groups include pyrrolyl, furyl, thiophenyl, imidazolyl, oxazolyl, and thiazolyl. Both aryl and heteroaryl groups may be optionally substituted. For example, M and M′ can be selected from the non-limiting group consisting of optionally substituted phenyl, oxazole, and thiazole. In the formulas herein, M and M′ can be independently selected from the list of biodegradable groups above. Unless otherwise specified, aryl or heteroaryl groups described herein refers to both unsubstituted and substituted groups, i.e., optionally substituted aryl or heteroaryl groups.

[0612] Alkyl, alkenyl, and cyclyl (e.g., carbocyclyl and heterocyclyl) groups may be optionally substituted unless otherwise specified. Optional substituents may be selected from the group consisting of, but are not limited to, a halogen atom (e.g., a chloride, bromide, fluoride, or iodide group), a carboxylic acid (e.g., C(O)OH), an alcohol (e.g., a hydroxyl, OH), an ester (e.g., C(O)OR OC(O)R), an aldehyde (e.g., C(O)H), a carbonyl (e.g., C(O)R, alternatively represented by C═O), an acyl halide (e.g., C(O)X, in which X is a halide selected from bromide, fluoride, chloride, and iodide), a carbonate (e.g., OC(O)OR), an alkoxy (e.g., OR), an acetal (e.g., C(OR)2R″″, in which each OR are alkoxy groups that can be the same or different and R″″ is an alkyl or alkenyl group), a phosphate (e.g., P(O)43-), a thiol (e.g., SH), a sulfoxide (e.g., S(O)R), a sulfinic acid (e.g., S(O)OH), a sulfonic acid (e.g., S(O)2OH), a thial (e.g., C(S)H), a sulfate (e.g., S(O)42-), a sulfonyl (e.g., S(O)2), an amide (e.g., C(O)NR2, or N(R)C(O)R), an azido (e.g., N3), a nitro (e.g., NO2), a cyano (e.g., CN), an isocyano (e.g., NC), an acyloxy (e.g., OC(O)R), an amino (e.g., NR2, NRH, or NH2), a carbamoyl (e.g., OC(O)NR2, OC(O)NRH, or OC(O)NH2), a sulfonamide (e.g., S(O)2NR2, S(O)2NRH, S(O)2NH2, N(R)S(O)2R, N(H)S(O)2R, N(R)S(O)2H, or N(H)S(O)2H), an alkyl group, an alkenyl group, and a cyclyl (e.g., carbocyclyl or heterocyclyl) group. In any of the preceding, R is an alkyl or alkenyl group, as defined herein. In some embodiments, the substituent groups themselves may be further substituted with, for example, one, two, three, four, five, or six substituents as defined herein. For example, a C1-6 alkyl group may be further substituted with one, two, three, four, five, or six substituents as described herein.

[0613] Compounds of the disclosure that contain nitrogens can be converted to N-oxides by treatment with an oxidizing agent (e.g., 3-chloroperoxybenzoic acid (mCPBA) and/or hydrogen peroxides) to afford other compounds of the disclosure. Thus, all shown and claimed nitrogen-containing compounds are considered, when allowed by valency and structure, to include both the compound as shown and its N-oxide derivative (which can be designated as N→O or N⁺—O⁻). Furthermore, in other instances, the nitrogens in the compounds of the disclosure can be converted to N-hydroxy or N-alkoxy compounds. For example, N-hydroxy compounds can be prepared by oxidation of the parent amine by an oxidizing agent such as m CPBA. All shown and claimed nitrogen-containing compounds are also considered, when allowed by valency and structure, to cover both the compound as shown and its N-hydroxy (i.e., N—OH) and N-alkoxy (i.e., N—OR, wherein R is substituted or unsubstituted C1-C6 alkyl, C1-C6 alkenyl, C1-C6 alkynyl, 3-14-membered carbocycle or 3-14-membered heterocycle) derivatives.

### Other Lipid Composition Components

[0614] The lipid composition of a pharmaceutical composition disclosed herein can include one or more components in addition to those described above. For example, the lipid composition can include one or more permeability enhancer molecules, carbohydrates, polymers, surface altering agents (e.g., surfactants), or other components. For example, a permeability enhancer molecule can be a molecule described by U.S. Patent Application Publication No. 2005/0222064. Carbohydrates can include simple sugars (e.g., glucose) and polysaccharides (e.g., glycogen and derivatives and analogs thereof).

[0615] A polymer can be included in and/or used to encapsulate or partially encapsulate a pharmaceutical composition disclosed herein (e.g., a pharmaceutical composition in lipid nanoparticle form). A polymer can be biodegradable and/or biocompatible. A polymer can be selected from, but is not limited to, polyamines, polyethers, polyamides, polyesters, polycarbamates, polyureas, polycarbonates, polystyrenes, polyimides, polysulfones, polyurethanes, polyacetylenes, polyethylenes, polyethyleneimines, polyisocyanates, polyacrylates, polymethacrylates, polyacrylonitriles, and polyarylates.

[0616] The ratio between the lipid composition and the polynucleotide range can be from about 10:1 to about 60:1 (wt/wt).

[0617] In some embodiments, the ratio between the lipid composition and the polynucleotide can be about 10:1, 11:1, 12:1, 13:1, 14:1, 15:1, 16:1, 17:1, 18:1, 19:1, 20:1, 21:1, 22:1, 23:1, 24:1, 25:1, 26:1, 27:1, 28:1, 29:1, 30:1, 31:1, 32:1, 33:1, 34:1, 35:1, 36:1, 37:1, 38:1, 39:1, 40:1, 41:1, 42:1, 43:1, 44:1, 45:1, 46:1, 47:1, 48:1, 49:1, 50:1, 51:1, 52:1, 53:1, 54:1, 55:1, 56:1, 57:1, 58:1, 59:1 or 60:1 (wt/wt). In some embodiments, the wt/wt ratio of the lipid composition to the polynucleotide encoding a therapeutic agent is about 20:1 or about 15:1. In some embodiments, the pharmaceutical composition disclosed herein can contain more than one polypeptides. For example, a pharmaceutical composition disclosed herein can contain two or more polynucleotides (e.g., RNA, e.g., mRNA).

[0618] In one embodiment, the lipid nanoparticles described herein can comprise polynucleotides (e.g., mRNA) in a lipid:polynucleotide weight ratio of 5:1, 10:1, 15:1, 20:1, 25:1, 30:1, 35:1, 40:1, 45:1, 50:1, 55:1, 60:1 or 70:1, or a range or any of these ratios such as, but not limited to, 5:1 to about 10:1, from about 5:1 to about 15:1, from about 5:1 to about 20:1, from about 5:1 to about 25:1, from about 5:1 to about 30:1, from about 5:1 to about 35:1, from about 5:1 to about 40:1, from about 5:1 to about 45:1, from about 5:1 to about 50:1, from about 5:1 to about 55:1, from about 5:1 to about 60:1, from about 5:1 to about 70:1, from about 10:1 to about 15:1, from about 10:1 to about 20:1, from about 10:1 to about 25:1, from about 10:1 to about 30:1, from about 10:1 to about 35:1, from about 10:1 to about 40:1, from about 10:1 to about 45:1, from about 10:1 to about 50:1, from about 10:1 to about 55:1, from about 10:1 to about 60:1, from about 10:1 to about 70:1, from about 15:1 to about 20:1, from about 15:1 to about 25:1,from about 15:1 to about 30:1, from about 15:1 to about 35:1, from about 15:1 to about 40:1, from about 15:1 to about 45:1, from about 15:1 to about 50:1, from about 15:1 to about 55:1, from about 15:1 to about 60:1 or from about 15:1 to about 70:1.

[0619] In one embodiment, the lipid nanoparticles described herein can comprise the polynucleotide in a concentration from approximately 0.1 mg/ml to 2 mg/ml such as, but not limited to, 0.1 mg/ml, 0.2 mg/ml, 0.3 mg/ml, 0.4 mg/ml, 0.5 mg/ml, 0.6 mg/ml, 0.7 mg/ml, 0.8 mg/ml, 0.9 mg/ml, 1.0 mg/ml, 1.1 mg/ml, 1.2 mg/ml, 1.3 mg/ml, 1.4 mg/ml, 1.5 mg/ml, 1.6 mg/ml, 1.7 mg/ml, 1.8 mg/ml, 1.9 mg/ml, 2.0 mg/ml or greater than 2.0 mg/ml.

### Nanoparticle Compositions

[0620] In some embodiments, the pharmaceutical compositions disclosed herein are formulated as lipid nanoparticles (LNP). Accordingly, the present disclosure also provides nanoparticle compositions comprising (i) a lipid composition comprising a delivery agent such as compound as described herein, and (ii) a polynucleotide encoding a ABCB4, ABCB11, or ATP8B1 polypeptide. The present disclosure also provides nanoparticle compositions comprising (i) a lipid composition comprising a delivery agent such as compound as described herein, and (ii) a polynucleotide encoding an ABCB4 polypeptide, a polynucleotide encoding an ABCB11 polypeptide, and a polynucleotide encoding an ATP8B1 polypeptide. In such nanoparticle composition, the lipid composition disclosed herein can encapsulate the polynucleotide(s) encoding an ABCB4, ABCB11, or ATP8B1polypeptide(s).

[0621] Nanoparticle compositions are typically sized on the order of micrometers or smaller and can include a lipid bilayer. Nanoparticle compositions encompass lipid nanoparticles (LNPs), liposomes (e.g., lipid vesicles), and lipoplexes. For example, a nanoparticle composition can be a liposome having a lipid bilayer with a diameter of 500 nm or less.

[0622] Nanoparticle compositions include, for example, lipid nanoparticles (LNPs), liposomes, and lipoplexes. In some embodiments, nanoparticle compositions are vesicles including one or more lipid bilayers. In certain embodiments, a nanoparticle composition includes two or more concentric bilayers separated by aqueous compartments. Lipid bilayers can be functionalized and/or crosslinked to one another. Lipid bilayers can include one or more ligands, proteins, or channels.

[0623] In one embodiment, a lipid nanoparticle comprises an ionizable lipid, a structural lipid, a phospholipid, and mRNA. In some embodiments, the LNP comprises an ionizable lipid, a PEG-modified lipid, a sterol and a structural lipid. In some embodiments, the LNP has a molar ratio of about 20-60% ionizable lipid: about 5-25% structural lipid: about 25-55% sterol; and about 0.5-15% PEG-modified lipid.

[0624] In some embodiments, the LNP has a polydispersity value of less than 0.4. In some embodiments, the LNP has a net neutral charge at a neutral pH. In some embodiments, the LNP has a mean diameter of 50-150 nm. In some embodiments, the LNP has a mean diameter of 80-100 nm.

[0625] As generally defined herein, the term “lipid” refers to a small molecule that has hydrophobic or amphiphilic properties. Lipids may be naturally occurring or synthetic. Examples of classes of lipids include, but are not limited to, fats, waxes, sterol-containing metabolites, vitamins, fatty acids, glycerolipids, glycerophospholipids, sphingolipids, saccharolipids, and polyketides, and prenol lipids. In some instances, the amphiphilic properties of some lipids leads them to form liposomes, vesicles, or membranes in aqueous media.

[0626] In some embodiments, a lipid nanoparticle (LNP) may comprise an ionizable lipid. As used herein, the term “ionizable lipid” has its ordinary meaning in the art and may refer to a lipid comprising one or more charged moieties. In some embodiments, an ionizable lipid may be positively charged or negatively charged. An ionizable lipid may be positively charged, in which case it can be referred to as “cationic lipid”. In certain embodiments, an ionizable lipid molecule may comprise an amine group, and can be referred to as an ionizable amino lipid. As used herein, a “charged moiety” is a chemical moiety that carries a formal electronic charge, e.g., monovalent (+1, or −1), divalent (+2, or −2), trivalent (+3, or −3), etc. The charged moiety may be anionic (i.e., negatively charged) or cationic (i.e., positively charged). Examples of positively-charged moieties include amine groups (e.g., primary, secondary, and/or tertiary amines), ammonium groups, pyridinium group, guanidine groups, and imidizolium groups. In a particular embodiment, the charged moieties comprise amine groups. Examples of negatively-charged groups or precursors thereof, include carboxylate groups, sulfonate groups, sulfate groups, phosphonate groups, phosphate groups, hydroxyl groups, and the like. The charge of the charged moiety may vary, in some cases, with the environmental conditions, for example, changes in pH may alter the charge of the moiety, and/or cause the moiety to become charged or uncharged. In general, the charge density of the molecule may be selected as desired.

[0627] It should be understood that the terms “charged” or “charged moiety” does not refer to a “partial negative charge” or “partial positive charge” on a molecule. The terms “partial negative charge” and “partial positive charge” are given its ordinary meaning in the art. A “partial negative charge” may result when a functional group comprises a bond that becomes polarized such that electron density is pulled toward one atom of the bond, creating a partial negative charge on the atom. Those of ordinary skill in the art will, in general, recognize bonds that can become polarized in this way.

[0628] In some embodiments, the ionizable lipid is an ionizable amino lipid, sometimes referred to in the art as an “ionizable cationic lipid”. In one embodiment, the ionizable amino lipid may have a positively charged hydrophilic head and a hydrophobic tail that are connected via a linker structure.

[0629] In addition to these, an ionizable lipid may also be a lipid including a cyclic amine group.

[0630] In one embodiment, the ionizable lipid may be selected from, but not limited to, a ionizable lipid described in International Publication Nos. WO2013086354 and WO2013116126; the contents of each of which are herein incorporated by reference in their entirety.

[0631] In yet another embodiment, the ionizable lipid may be selected from, but not limited to, formula CLI-CLXXXXII of U.S. Pat. No. 7,404,969; each of which is herein incorporated by reference in their entirety.

[0632] In one embodiment, the lipid may be a cleavable lipid such as those described in International Publication No. WO2012170889, herein incorporated by reference in its entirety. In one embodiment, the lipid may be synthesized by methods known in the art and/or as described in International Publication Nos. WO2013086354; the contents of each of which are herein incorporated by reference in their entirety.

[0633] Nanoparticle compositions can be characterized by a variety of methods. For example, microscopy (e.g., transmission electron microscopy or scanning electron microscopy) can be used to examine the morphology and size distribution of a nanoparticle composition. Dynamic light scattering or potentiometry (e.g., potentiometric titrations) can be used to measure zeta potentials. Dynamic light scattering can also be utilized to determine particle sizes. Instruments such as the Zetasizer Nano ZS (Malvern Instruments Ltd, Malvern, Worcestershire, UK) can also be used to measure multiple characteristics of a nanoparticle composition, such as particle size, polydispersity index, and zeta potential.

[0634] The size of the nanoparticles can help counter biological reactions such as, but not limited to, inflammation, or can increase the biological effect of the polynucleotide. As used herein, “size” or “mean size” in the context of nanoparticle compositions refers to the mean diameter of a nanoparticle composition.

[0635] In one embodiment, the polynucleotide encoding an ABCB4, ABCB11, or ATP8B1 polypeptide are formulated in lipid nanoparticles having a diameter from about 10 to about 100 nm such as, but not limited to, about 10 to about 20 nm, about 10 to about 30 nm, about 10 to about 40 nm, about 10 to about 50 nm, about 10 to about 60 nm, about 10 to about 70 nm, about 10 to about 80 nm, about 10 to about 90 nm, about 20 to about 30 nm, about 20 to about 40 nm, about 20 to about 50 nm, about 20 to about 60 nm, about 20 to about 70 nm, about 20 to about 80 nm, about 20 to about 90 nm, about 20 to about 100 nm, about 30 to about 40 nm, about 30 to about 50 nm, about 30 to about 60 nm, about 30 to about 70 nm, about 30 to about 80 nm, about 30 to about 90 nm, about 30 to about 100 nm, about 40 to about 50 nm, about 40 to about 60 nm, about 40 to about 70 nm, about 40 to about 80 nm, about 40 to about 90 nm, about 40 to about 100 nm, about 50 to about 60 nm, about 50 to about 70 nm, about 50 to about 80 nm, about 50 to about 90 nm, about 50 to about 100 nm, about 60 to about 70 nm, about 60 to about 80 nm, about 60 to about 90 nm, about 60 to about 100 nm, about 70 to about 80 nm, about 70 to about 90 nm, about 70 to about 100 nm, about 80 to about 90 nm, about 80 to about 100 nm and/or about 90 to about 100 nm.

[0636] In one embodiment, the nanoparticles have a diameter from about 10 to 500 nm. In one embodiment, the nanoparticle has a diameter greater than 100 nm, greater than 150 nm, greater than 200 nm, greater than 250 nm, greater than 300 nm, greater than 350 nm, greater than 400 nm, greater than 450 nm, greater than 500 nm, greater than 550 nm, greater than 600 nm, greater than 650 nm, greater than 700 nm, greater than 750 nm, greater than 800 nm, greater than 850 nm, greater than 900 nm, greater than 950 nm or greater than 1000 nm. In some embodiments, the largest dimension of a nanoparticle composition is 1 μm or shorter (e.g., 1 μm, 900 nm, 800 nm, 700 nm, 600 nm, 500 nm, 400 nm, 300 nm, 200 nm, 175 nm, 150 nm, 125 nm, 100 nm, 75 nm, 50 nm, or shorter).

[0637] A nanoparticle composition can be relatively homogenous. A polydispersity index can be used to indicate the homogeneity of a nanoparticle composition, e.g., the particle size distribution of the nanoparticle composition. A small (e.g., less than 0.3) polydispersity index generally indicates a narrow particle size distribution. A nanoparticle composition can have a polydispersity index from about 0 to about 0.25, such as 0.01, 0.02, 0.03, 0.04, 0.05, 0.06, 0.07, 0.08, 0.09, 0.10, 0.11, 0.12, 0.13, 0.14, 0.15, 0.16, 0.17, 0.18, 0.19, 0.20, 0.21, 0.22, 0.23, 0.24, or 0.25. In some embodiments, the polydispersity index of a nanoparticle composition disclosed herein can be from about 0.10 to about 0.20.

[0638] The zeta potential of a nanoparticle composition can be used to indicate the electrokinetic potential of the composition. For example, the zeta potential can describe the surface charge of a nanoparticle composition. Nanoparticle compositions with relatively low charges, positive or negative, are generally desirable, as more highly charged species can interact undesirably with cells, tissues, and other elements in the body. In some embodiments, the zeta potential of a nanoparticle composition disclosed herein can be from about −10 mV to about +20 mV, from about −10 mV to about +15 mV, from about 10 mV to about +10 mV, from about −10 mV to about +5 mV, from about −10 mV to about 0 mV, from about −10 mV to about −5 mV, from about −5 mV to about +20 mV, from about −5 mV to about +15 mV, from about −5 mV to about +10 mV, from about −5 mV to about +5 mV, from about −5 mV to about 0 mV, from about 0 mV to about +20 mV, from about 0 mV to about +15 mV, from about 0 mV to about +10 mV, from about 0 mV to about +5 mV, from about +5 mV to about +20 mV, from about +5 mV to about +15 mV, or from about +5 mV to about +10 mV.

[0639] In some embodiments, the zeta potential of the lipid nanoparticles can be from about 0 mV to about 100 mV, from about 0 mV to about 90 mV, from about 0 mV to about 80 mV, from about 0 mV to about 70 mV, from about 0 mV to about 60 mV, from about 0 mV to about 50 mV, from about 0 mV to about 40 mV, from about 0 mV to about 30 mV, from about 0 mV to about 20 mV, from about 0 mV to about 10 mV, from about 10 mV to about 100 mV, from about 10 mV to about 90 mV, from about 10 mV to about 80 mV, from about 10 mV to about 70 mV, from about 10 mV to about 60 mV, from about 10 mV to about 50 mV, from about 10 mV to about 40 mV, from about 10 mV to about 30 mV, from about 10 mV to about 20 mV, from about 20 mV to about 100 mV, from about 20 mV to about 90 mV, from about 20 mV to about 80 mV, from about 20 mV to about 70 mV, from about 20 mV to about 60 mV, from about 20 mV to about 50 mV, from about 20 mV to about 40 mV, from about 20 mV to about 30 mV, from about 30 mV to about 100 mV, from about 30 mV to about 90 mV, from about 30 mV to about 80 mV, from about 30 mV to about 70 mV, from about 30 mV to about 60 mV, from about 30 mV to about 50 mV, from about 30 mV to about 40 mV, from about 40 mV to about 100 mV, from about 40 mV to about 90 mV, from about 40 mV to about 80 mV, from about 40 mV to about 70 mV, from about 40 mV to about 60 mV, and from about 40 mV to about 50 mV. In some embodiments, the zeta potential of the lipid nanoparticles can be from about 10 mV to about 50 mV, from about 15 mV to about 45 mV, from about 20 mV to about 40 mV, and from about 25 mV to about 35 mV. In some embodiments, the zeta potential of the lipid nanoparticles can be about 10 mV, about 20 mV, about 30 mV, about 40 mV, about 50 mV, about 60 mV, about 70 mV, about 80 mV, about 90 mV, and about 100 mV.

[0640] The term “encapsulation efficiency” of a polynucleotide describes the amount of the polynucleotide that is encapsulated by or otherwise associated with a nanoparticle composition after preparation, relative to the initial amount provided. As used herein, “encapsulation” can refer to complete, substantial, or partial enclosure, confinement, surrounding, or encasement.

[0641] Encapsulation efficiency is desirably high (e.g., close to 100%). The encapsulation efficiency can be measured, for example, by comparing the amount of the polynucleotide in a solution containing the nanoparticle composition before and after breaking up the nanoparticle composition with one or more organic solvents or detergents.

[0642] Fluorescence can be used to measure the amount of free polynucleotide in a solution. For the nanoparticle compositions described herein, the encapsulation efficiency of a polynucleotide can be at least 50%, for example 50%, 55%, 60%, 65%, 70%, 75%, 80%, 85%, 90%, 91%, 92%, 93%, 94%, 95%, 96%, 97%, 98%, 99%, or 100%. In some embodiments, the encapsulation efficiency can be at least 80%. In certain embodiments, the encapsulation efficiency can be at least 90%.

[0643] The amount of a polynucleotide present in a pharmaceutical composition disclosed herein can depend on multiple factors such as the size of the polynucleotide, desired target and/or application, or other properties of the nanoparticle composition as well as on the properties of the polynucleotide.

[0644] For example, the amount of an mRNA useful in a nanoparticle composition can depend on the size (expressed as length, or molecular mass), sequence, and other characteristics of the mRNA. The relative amounts of a polynucleotide in a nanoparticle composition can also vary.

[0645] The relative amounts of the lipid composition and the polynucleotide present in a lipid nanoparticle composition of the present disclosure can be optimized according to considerations of efficacy and tolerability. For compositions including an mRNA as a polynucleotide, the N:P ratio can serve as a useful metric.

[0646] As the N:P ratio of a nanoparticle composition controls both expression and tolerability, nanoparticle compositions with low N:P ratios and strong expression are desirable. N:P ratios vary according to the ratio of lipids to RNA in a nanoparticle composition.

[0647] In general, a lower N:P ratio is preferred. The one or more RNA, lipids, and amounts thereof can be selected to provide an N:P ratio from about 2:1 to about 30:1, such as 2:1, 3:1, 4:1, 5:1, 6:1, 7:1, 8:1, 9:1, 10:1, 12:1, 14:1, 16:1, 18:1, 20:1, 22:1, 24:1, 26:1, 28:1, or 30:1. In certain embodiments, the N:P ratio can be from about 2:1 to about 8:1. In other embodiments, the N:P ratio is from about 5:1 to about 8:1. In certain embodiments, the N:P ratio is between 5:1 and 6:1. In one specific aspect, the N:P ratio is about is about 5.67:1.

[0648] In addition to providing nanoparticle compositions, the present disclosure also provides methods of producing lipid nanoparticles comprising encapsulating a polynucleotide. Such method comprises using any of the pharmaceutical compositions disclosed herein and producing lipid nanoparticles in accordance with methods of production of lipid nanoparticles known in the art. See, e.g., Wang et al. (2015) “Delivery of oligonucleotides with lipid nanoparticles” Adv. Drug Deliv. Rev. 87:68-80; Silva et al. (2015) “Delivery Systems for Biopharmaceuticals. Part I: Nanoparticles and Microparticles” Curr. Pharm. Technol. 16: 940-954; Naseri et al. (2015) “Solid Lipid Nanoparticles and Nanostructured Lipid Carriers: Structure, Preparation and Application” Adv. Pharm. Bull. 5:305-13; Silva et al. (2015) “Lipid nanoparticles for the delivery of biopharmaceuticals” Curr. Pharm. Biotechnol. 16:291-302, and references cited therein.

### Other Delivery Agents

### Liposomes, Lipoplexes, and Lipid Nanoparticles

[0649] In some embodiments, the compositions or formulations of the present disclosure comprise a delivery agent, e.g., a liposome, a lioplexes, a lipid nanoparticle, or any combination thereof. The polynucleotides described herein (e.g., a polynucleotide comprising a nucleotide sequence encoding an ABCB4, ABCB11, or ATP8B1 polypeptide) can be formulated using one or more liposomes, lipoplexes, or lipid nanoparticles. Liposomes, lipoplexes, or lipid nanoparticles can be used to improve the efficacy of the polynucleotides directed protein production as these formulations can increase cell transfection by the polynucleotide; and/or increase the translation of encoded protein. The liposomes, lipoplexes, or lipid nanoparticles can also be used to increase the stability of the polynucleotides.

[0650] Liposomes are artificially-prepared vesicles that can primarily be composed of a lipid bilayer and can be used as a delivery vehicle for the administration of pharmaceutical formulations. Liposomes can be of different sizes. A multilamellar vesicle (MLV) can be hundreds of nanometers in diameter, and can contain a series of concentric bilayers separated by narrow aqueous compartments. A small unicellular vesicle (SUV) can be smaller than 50 nm in diameter, and a large unilamellar vesicle (LUV) can be between 50 and 500 nm in diameter. Liposome design can include, but is not limited to, opsonins or ligands to improve the attachment of liposomes to unhealthy tissue or to activate events such as, but not limited to, endocytosis. Liposomes can contain a low or a high pH value in order to improve the delivery of the pharmaceutical formulations.

[0651] The formation of liposomes can depend on the pharmaceutical formulation entrapped and the liposomal ingredients, the nature of the medium in which the lipid vesicles are dispersed, the effective concentration of the entrapped substance and its potential toxicity, any additional processes involved during the application and/or delivery of the vesicles, the optimal size, polydispersity and the shelf-life of the vesicles for the intended application, and the batch-to-batch reproducibility and scale up production of safe and efficient liposomal products, etc.

[0652] As a non-limiting example, liposomes such as synthetic membrane vesicles can be prepared by the methods, apparatus and devices described in U.S. Pub. Nos. US20130177638, US20130177637, US20130177636, US20130177635, US20130177634, US20130177633, US20130183375, US20130183373, and US20130183372. In some embodiments, the polynucleotides described herein can be encapsulated by the liposome and/or it can be contained in an aqueous core that can then be encapsulated by the liposome as described in, e.g., Intl. Pub. Nos. WO2012031046, WO2012031043, WO2012030901, WO2012006378, and WO2013086526; and U.S. Pub.Nos. US20130189351, US20130195969 and US20130202684. Each of the references in herein incorporated by reference in its entirety.

[0653] In some embodiments, the polynucleotides described herein can be formulated in a cationic oil-in-water emulsion where the emulsion particle comprises an oil core and a cationic lipid that can interact with the polynucleotide anchoring the molecule to the emulsion particle. In some embodiments, the polynucleotides described herein can be formulated in a water-in-oil emulsion comprising a continuous hydrophobic phase in which the hydrophilic phase is dispersed. Exemplary emulsions can be made by the methods described in Intl. Pub. Nos. WO2012006380 and WO201087791, each of which is herein incorporated by reference in its entirety.

[0654] In some embodiments, the polynucleotides described herein can be formulated in a lipid-polycation complex. The formation of the lipid-polycation complex can be accomplished by methods as described in, e.g., U.S. Pub. No. US20120178702. As a non-limiting example, the polycation can include a cationic peptide or a polypeptide such as, but not limited to, polylysine, polyornithine and/or polyarginine and the cationic peptides described in Intl. Pub. No. WO2012013326 or U.S. Pub. No. US20130142818. Each of the references is herein incorporated by reference in its entirety.

[0655] In some embodiments, the polynucleotides described herein can be formulated in a lipid nanoparticle (LNP) such as those described in Intl. Pub. Nos. WO2013123523, WO2012170930, WO2011127255 and WO2008103276; and U.S. Pub. No. US20130171646, each of which is herein incorporated by reference in its entirety.

[0656] Lipid nanoparticle formulations typically comprise one or more lipids. In some embodiments, the lipid is an ionizable lipid (e.g., an ionizable amino lipid), sometimes referred to in the art as an “ionizable cationic lipid”. In some embodiments, lipid nanoparticle formulations further comprise other components, including a phospholipid, a structural lipid, and a molecule capable of reducing particle aggregation, for example a PEG or PEG-modified lipid.

[0657] Exemplary ionizable lipids include, but not limited to, any one of Compounds 1-342 disclosed herein, DLin-MC3-DMA (MC3), DLin-DMA, DLenDMA, DLin-D-DMA, DLin-K-DMA, DLin-M-C2-DMA, DLin-K-DMA, DLin-KC2-DMA, DLin-KC3-DMA, DLin-KC4-DMA, DLin-C2K-DMA, DLin-MP-DMA, DODMA, 98N12-5, C12-200, DLin-C-DAP, DLin-DAC, DLinDAP, DLinAP, DLin-EG-DMA, DLin-2-DMAP, KL10, KL22, KL25, Octyl-CLinDMA, Octyl-CLinDMA (2R), Octyl-CLinDMA (2S), and any combination thereof. Other exemplary ionizable lipids include, (13Z,16Z)-N,N-dimethyl-3-nonyldocosa-13,16-dien-1-amine (L608), (20Z,23Z)-N,N-dimethylnonacosa-20,23-dien-10-amine, (17Z,20Z)-N,N-dimemylhexacosa-17,20-dien-9-amine, (16Z,19Z)-N5N-dimethylpentacosa-16,19-dien-8-amine, (13Z,16Z)-N,N-dimethyldocosa-13,16-dien-5-amine, (12Z,15Z)-N,N-dimethylhenicosa-12,15-dien-4-amine, (14Z,17Z)-N,N-dimethyltricosa-14,17-dien-6-amine, (15Z,18Z)-N,N-dimethyltetracosa-15,18-dien-7-amine, (18Z,21Z)-N,N-dimethylheptacosa-18,21-dien-10-amine, (15Z,18Z)-N,N-dimethyltetracosa-15,18-dien-5-amine, (14Z,17Z)-N,N-dimethyltricosa-14,17-dien-4-amine, (19Z,22Z)-N,N-dimeihyloctacosa-19,22-dien-9-amine, (18Z,21Z)-N,N-dimethylheptacosa-18,21-dien-8-amine, (17Z,20Z)-N,N-dimethylhexacosa-17,20-dien-7-amine, (16Z,19Z)-N,N-dimethylpentacosa-16,19-dien-6-amine, (22Z,25Z)-N,N-dimethylhentriaconta-22,25-dien-10-amine, (21Z,24Z)-N,N-dimethyltriaconta-21,24-dien-9-amine, (18Z)-N,N-dimetylheptacos-18-en-10-amine, (17Z)-N,N-dimethylhexacos-17-en-9-amine, (19Z,22Z)-N,N-dimethyloctacosa-19,22-dien-7-amine, N,N-dimethylheptacosan-10-amine, (20Z,23Z)-N-ethyl -N-methylnonacosa-20,23-dien-10-amine, 1-[(11Z,14Z)-1-nonylicosa-11,14-dien-1-yl]pyrrolidine, (20Z)-N,N-dimethylheptacos-20-en-10-amine, (15Z)-N,N-dimethyl eptacos-15-en-10-amine, (14Z)-N,N-dimethylnonacos-14-en-10-amine, (17Z)-N,N-dimethylnonacos-17-en-10-amine, (24Z)-N,N-dimethyltritriacont-24-en-10-amine, (20Z)-N,N-dimethylnonacos-20-en-10-amine, (22Z)-N,N-dimethylhentriacont-22-en-10-amine, (16Z)-N,N-dimethylpentacos-16-en-8-amine, (12Z,15Z)-N,N-dimethyl-2-nonylhenicosa-12,15-dien-1-amine, N,N-dimethyl-1-[(1S,2R)-2-octylcyclopropyl] eptadecan-8-amine, 1-[(1S,2R)-2-hexylcyclopropyl]-N,N-dimethylnonadecan-10-amine, N,N-dimethyl-1-[(1 S,2R)-2-octylcyclopropyl]nonadecan-10-amine, N,N-dimethyl-21-[(1S,2R)-2-octylcyclopropyl]henicosan-10-amine, N,N-dimethyl-1-[(1S,2S)-2-{[(1R,2R)-2-pentylcycIopropyl]methyl}cyclopropyl]nonadecan-10-amine, N,N-dimethyl-1-[(1S,2R)-2-octylcyclopropyl]hexadecan-8-amine, N,N-dimethyl-[(1R,2S)-2-undecyIcyclopropyl]tetradecan-5-amine, N,N-dimethyl-3-{7-[(1S,2R)-2-octylcyclopropyl]heptyl}dodecan-1-amine, 1-[(1R,2S)-2-heptylcyclopropyl]-N,N-dimethyloctadecan-9-amine, 1-[(1S,2R)-2-decylcyclopropyl]-N,N-dimethylpentadecan-6-amine, N,N-dimethyl-1-[(1S,2R)-2-octylcyclopropyl]pentadecan-8-amine, R-N,N-dimethyl-1-[(9Z,12Z)-octadeca-9,12-dien-1-yloxy]-3-(octyloxy)propan-2-amine, S-N,N-dimethyl-1-[(9Z,12Z)-octadeca-9,12-dien-1-yloxy]-3-(octyloxy)propan-2-amine, 1-{2-[(9Z,12Z)-octadeca-9,12-dien-1-yloxy]-1-[(octyloxy)methyl]ethyl}pyrrolidine, (2S)-N,N-dimethyl-1-[(9Z,12Z)-octadeca-9,12-dien-1-yloxy]-3-[(5Z)-oct-5-en-1-yloxy]propan-2-amine, 1-{2-[(9Z,12Z)-octadeca-9,12-dien-1-yloxy]-1-[(octyloxy)methyl]ethyl}azetidine, (2S)-1-(hexyloxy)-N,N-dimethyl-3-[(9Z,12Z)-octadeca-9,12-dien-1-yloxy]propan-2-amine, (2S)-1-(heptyloxy)-N,N-dimethyl-3-[(9Z,12Z)-octadeca-9,12-dien-1-yloxy]propan-2-amine, N,N-dimethyl-1-(nonyloxy)-3-[(9Z,12Z)-octadeca-9,12-dien-1-yloxy]propan-2-amine, N,N-dimethyl-1-[(9Z)-octadec-9-en-1-yloxy]-3-(octyloxy)propan-2-amine; (2S)-N,N-dimethyl-1-[(6Z,9Z,12Z)-octadeca-6,9,12-trien-1-yloxy]-3-(octyloxy)propan-2-amine, (2S)-1-[(11Z,14Z)-icosa-11,14-dien-1-yloxy]-N,N-dimethyl-3-(pentyloxy)propan-2-amine, (2S)-1-(hexyloxy)-3-[(11Z,14Z)-icosa-11,14-dien-1-yloxy]-N,N-dimethylpropan-2-amine, 1-[(11Z,14Z)-icosa-11,14-dien-1-yloxy]-N,N-dimethyl-3-(octyloxy)propan-2-amine, 1-[(13Z,16Z)-docosa-13,16-dien-1-yloxy]-N,N-dimethyl-3-(octyloxy)propan-2-amine, (2S)-1-[(13Z, 16Z)-docosa-13,16-dien-1-yloxy]-3-(hexyloxy)-N,N-dimethylpropan-2-amine, (2S)-1-[(13Z)-docos-13-en-1-yloxy]-3-(hexyloxy)-N,N-dimethylpropan-2-amine, 1-[(13Z)-docos-13-en-1-yloxy]-N,N-dimethyl-3-(octyloxy)propan-2-amine, 1-[(9Z)-hexadec-9-en-1-yloxy]-N,N-dimethyl-3-(octyloxy)propan-2-amine, (2R)-N,N-dimethyl-H(1-metoyloctyl)oxy]-3-[(9Z,12Z)-octadeca-9,12-dien-1-yloxy]propan-2-amine, (2R)-1-[(3,7-dimethyloctyl)oxy]-N,N-dimethyl-3-[(9Z,12Z)-octadeca-9,12-dien-1-yloxy]propan-2-amine, N,N-dimethyl-1-(octyloxy)-3-({8-[(1S,2S)-2-{[(1R,2R)-2-pentylcyclopropyl]methyl}cyclopropyl]octyl}oxy)propan-2-amine, N,N-dimethyl-1-{[8-(2-oclylcyclopropyl)octyl]oxy-}3-(octyloxy)propan-2-amine, and (11E,20Z,23Z)-N,N-dimethylnonacosa-11,20,2-trien-10-amine, and any combination thereof.

[0658] Phospholipids include, but are not limited to, glycerophospholipids such as phosphatidylcholines, phosphatidylethanolamines, phosphatidylserines, phosphatidylinositols, phosphatidy glycerols, and phosphatidic acids. Phospholipids also include phosphosphingolipid, such as sphingomyelin. In some embodiments, the phospholipids are DLPC, DMPC, DOPC, DPPC, DSPC, DUPC, 18:0 Diether PC, DLnPC, DAPC, DHAPC, DOPE, 4ME 16:0 PE, DSPE, DLPE,DLnPE, DAPE, DHAPE, DOPG, and any combination thereof In some embodiments, the phospholipids are MPPC, MSPC, PMPC, PSPC, SMPC, SPPC, DHAPE, DOPG, and any combination thereof. In some embodiments, the amount of phospholipids (e.g., DSPC) in the lipid composition ranges from about 1 mol % to about 20 mol %.

[0659] The structural lipids include sterols and lipids containing sterol moieties. In some embodiments, the structural lipids include cholesterol, fecosterol, sitosterol, ergosterol, campesterol, stigmasterol, brassicasterol, tomatidine, tomatine, ursolic acid, alpha-tocopherol, and mixtures thereof In some embodiments, the structural lipid is cholesterol. In some embodiments, the amount of the structural lipids (e.g., cholesterol) in the lipid composition ranges from about 20 mol % to about 60 mol %.

[0660] The PEG-modified lipids include PEG-modified phosphatidylethanolamine and phosphatidic acid, PEG-ceramide conjugates (e.g., PEG-CerC14 or PEG-CerC20), PEG-modified dialkylamines and PEG-modified 1,2-diacyloxypropan-3-amines. Such lipids are also referred to as PEGylated lipids. For example, a PEG lipid can be PEG-c-DOMG, PEG-DMG, PEG-DLPE, PEG DMPE, PEG-DPPC, or a PEG-DSPE lipid. In some embodiments, the PEG-lipid are 1,2-dimyristoyl-sn-glycerol methoxypolyethylene glycol (PEG-DMG), 1,2-distearoyl-sn-glycero-3-phosphoethanolamine-N-[amino(polyethylene glycol)] (PEG-DSPE), PEG-disteryl glycerol (PEG-DSG), PEG-dipalmetoleyl, PEG-dioleyl, PEG-distearyl, PEG-diacylglycamide (PEG-DAG), PEG-dipalmitoyl phosphatidylethanolamine (PEG-DPPE), or PEG-1,2-dimyristyloxlpropyl-3-amine (PEG-c-DMA). In some embodiments, the PEG moiety has a size of about 1000, 2000, 5000, 10,000, 15,000 or 20,000 daltons. In some embodiments, the amount of PEG-lipid in the lipid composition ranges from about 0 mol % to about 5 mol %.

[0661] In some embodiments, the LNP formulations described herein can additionally comprise a permeability enhancer molecule. Non-limiting permeability enhancer molecules are described in U.S. Pub. No. US20050222064, herein incorporated by reference in its entirety.

[0662] The LNP formulations can further contain a phosphate conjugate. The phosphate conjugate can increase in vivo circulation times and/or increase the targeted delivery of the nanoparticle. Phosphate conjugates can be made by the methods described in, e.g., Intl. Pub. No. WO2013033438 or U.S. Pub. No. US20130196948. The LNP formulation can also contain a polymer conjugate (e.g., a water soluble conjugate) as described in, e.g., U.S. Pub. Nos. US20130059360, US20130196948, and US20130072709. Each of the references is herein incorporated by reference in its entirety.

[0663] The LNP formulations can comprise a conjugate to enhance the delivery of nanoparticles of the present invention in a subject. Further, the conjugate can inhibit phagocytic clearance of the nanoparticles in a subject. In some embodiments, the conjugate can be a “self” peptide designed from the human membrane protein CD47 (e.g., the “self” particles described by Rodriguez et al, Science 2013 339, 971-975, herein incorporated by reference in its entirety). As shown by Rodriguez et al. the self peptides delayed macrophage-mediated clearance of nanoparticles which enhanced delivery of the nanoparticles.

[0664] The LNP formulations can comprise a carbohydrate carrier. As a non-limiting example, the carbohydrate carrier can include, but is not limited to, an anhydride-modified phytoglycogen or glycogen-type material, phytoglycogen octenyl succinate, phytoglycogen beta-dextrin, anhydride-modified phytoglycogen beta-dextrin (e.g., Intl. Pub. No. WO2012109121, herein incorporated by reference in its entirety).

[0665] The LNP formulations can be coated with a surfactant or polymer to improve the delivery of the particle. In some embodiments, the LNP can be coated with a hydrophilic coating such as, but not limited to, PEG coatings and/or coatings that have a neutral surface charge as described in U.S. Pub. No. US20130183244, herein incorporated by reference in its entirety.

[0666] The LNP formulations can be engineered to alter the surface properties of particles so that the lipid nanoparticles can penetrate the mucosal barrier as described in U.S. Pat. No. 8,241,670 or Intl. Pub. No. W02013110028, each of which is herein incorporated by reference in its entirety.

[0667] The LNP engineered to penetrate mucus can comprise a polymeric material (i.e., a polymeric core) and/or a polymer-vitamin conjugate and/or a tri-block co-polymer. The polymeric material can include, but is not limited to, polyamines, polyethers, polyamides, polyesters, polycarbamates, polyureas, polycarbonates, poly(styrenes), polyimides, polysulfones, polyurethanes, polyacetylenes, polyethylenes, polyethyeneimines, polyisocyanates, polyacrylates, polymethacrylates, polyacrylonitriles, and polyarylates.

[0668] LNP engineered to penetrate mucus can also include surface altering agents such as, but not limited to, polynucleotides, anionic proteins (e.g., bovine serum albumin), surfactants (e.g., cationic surfactants such as for example dimethyldioctadecyl-ammonium bromide), sugars or sugar derivatives (e.g., cyclodextrin), nucleic acids, polymers (e.g., heparin, polyethylene glycol and poloxamer), mucolytic agents (e.g., N-acetylcysteine, mugwort, bromelain, papain, clerodendrum, acetylcysteine, bromhexine, carbocisteine, eprazinone, mesna, ambroxol, sobrerol, domiodol, letosteine, stepronin, tiopronin, gelsolin, thymosin (34 dornase alfa, neltenexine, erdosteine) and various DNases including rhDNase.

[0669] In some embodiments, the mucus penetrating LNP can be a hypotonic formulation comprising a mucosal penetration enhancing coating. The formulation can be hypotonic for the epithelium to which it is being delivered. Non-limiting examples of hypotonic formulations can be found in, e.g., Intl. Pub. No. WO2013110028, herein incorporated by reference in its entirety.

[0670] In some embodiments, the polynucleotide described herein is formulated as a lipoplex, such as, without limitation, the ATUPLEX™ system, the DACC system, the DBTC system and other siRNA-lipoplex technology from Silence Therapeutics (London, United Kingdom), STEMFECT™ from STEMGENT® (Cambridge, Mass.), and polyethylenimine (PEI) or protamine-based targeted and non-targeted delivery of nucleic acids (Aleku et al. Cancer Res. 2008 68:9788-9798; Strumberg et al. Int J Clin Pharmacol Ther 2012 50:76-78; Santel et al., Gene Ther 2006 13:1222-1234; Santel et al., Gene Ther 2006 13:1360-1370; Gutbier et al., Pulm Pharmacol. Ther. 2010 23:334-344; Kaufmann et al. Microvasc Res 2010 80:286-293Weide et al. J Immunother. 2009 32:498-507; Weide et al. J Immunother. 2008 31:180-188; Pascolo Expert Opin. Biol. Ther. 4:1285-1294; Fotin-Mleczek et al., 2011 J. Immunother. 34:1-15; Song et al., Nature Biotechnol. 2005, 23:709-717; Peer et al., Proc Natl Acad Sci USA. 2007 6;104:4095-4100; deFougerolles Hum Gene Ther. 2008 19:125-132; all of which are incorporated herein by reference in its entirety).

[0671] In some embodiments, the polynucleotides described herein are formulated as a solid lipid nanoparticle (SLN), which can be spherical with an average diameter between 10 to 1000 nm. SLN possess a solid lipid core matrix that can solubilize lipophilic molecules and can be stabilized with surfactants and/or emulsifiers. Exemplary SLN can be those as described in Intl. Pub. No. W02013105101, herein incorporated by reference in its entirety.

[0672] In some embodiments, the polynucleotides described herein can be formulated for controlled release and/or targeted delivery. As used herein, “controlled release” refers to a pharmaceutical composition or compound release profile that conforms to a particular pattern of release to effect a therapeutic outcome. In one embodiment, the polynucleotides can be encapsulated into a delivery agent described herein and/or known in the art for controlled release and/or targeted delivery. As used herein, the term “encapsulate” means to enclose, surround or encase. As it relates to the formulation of the compounds of the invention, encapsulation can be substantial, complete or partial. The term “substantially encapsulated” means that at least greater than 50, 60, 70, 80, 85, 90, 95, 96, 97, 98, 99, or greater than 99% of the pharmaceutical composition or compound of the invention can be enclosed, surrounded or encased within the delivery agent. “Partially encapsulation” means that less than 10, 10, 20, 30, 40 50 or less of the pharmaceutical composition or compound of the invention can be enclosed, surrounded or encased within the delivery agent.

[0673] Advantageously, encapsulation can be determined by measuring the escape or the activity of the pharmaceutical composition or compound of the invention using fluorescence and/or electron micrograph. For example, at least 1, 5, 10, 20, 30, 40, 50, 60, 70, 80, 85, 90, 95, 96, 97, 98, 99, 99.9, or greater than 99% of the pharmaceutical composition or compound of the invention are encapsulated in the delivery agent.

[0674] In some embodiments, the polynucleotides described herein can be encapsulated in a therapeutic nanoparticle, referred to herein as “therapeutic nanoparticle polynucleotides.” Therapeutic nanoparticles can be formulated by methods described in, e.g., Intl. Pub. Nos. WO2010005740, WO2010030763, WO2010005721, WO2010005723, and WO2012054923; and U.S. Pub. Nos. US20110262491, US20100104645, US20100087337, US20100068285, US20110274759, US20100068286, US20120288541, US20120140790, US20130123351 and US20130230567; and U.S. Pat. Nos. 8,206,747, 8,293,276, 8,318,208 and 8,318,211, each of which is herein incorporated by reference in its entirety.

[0675] In some embodiments, the therapeutic nanoparticle polynucleotide can be formulated for sustained release. As used herein, “sustained release” refers to a pharmaceutical composition or compound that conforms to a release rate over a specific period of time. The period of time can include, but is not limited to, hours, days, weeks, months and years. As a non-limiting example, the sustained release nanoparticle of the polynucleotides described herein can be formulated as disclosed in Intl. Pub. No. WO2010075072 and U.S. Pub. Nos. US20100216804, US20110217377, US20120201859 and US20130150295, each of which is herein incorporated by reference in their entirety.

[0676] In some embodiments, the therapeutic nanoparticle polynucleotide can be formulated to be target specific, such as those described in Intl. Pub. Nos. WO2008121949, WO2010005726, WO2010005725, WO2011084521 and WO2011084518; and U.S. Pub. Nos. US20100069426, US20120004293 and US20100104655, each of which is herein incorporated by reference in its entirety.

[0677] The LNPs can be prepared using microfluidic mixers or micromixers. Exemplary microfluidic mixers can include, but are not limited to, a slit interdigital micromixer including, but not limited to those manufactured by Microinnova (Allerheiligen bei Wildon, Austria) and/or a staggered herringbone micromixer (SHM) (see Zhigaltsevet al., “Bottom-up design and synthesis of limit size lipid nanoparticle systems with aqueous and triglyceride cores using millisecond microfluidic mixing,” Langmuir 28:3633-40 (2012); Belliveau et al., “Microfluidic synthesis of highly potent limit-size lipid nanoparticles for in vivo delivery of siRNA,” Molecular Therapy-Nucleic Acids. 1:e37 (2012); Chen et al., “Rapid discovery of potent siRNA-containing lipid nanoparticles enabled by controlled microfluidic formulation,” J. Am. Chem. Soc. 134(16):6948-51 (2012); each of which is herein incorporated by reference in its entirety). Exemplary micromixers include Slit Interdigital Microstructured Mixer (SIMM-V2) or a Standard Slit Interdigital Micro Mixer (SSIMM) or Caterpillar (CPMM) or Impinging-jet (IJMM,) from the Institut fur Mikrotechnik Mainz GmbH, Mainz Germany. In some embodiments, methods of making LNP using SHM further comprise mixing at least two input streams wherein mixing occurs by microstructure-induced chaotic advection (MICA). According to this method, fluid streams flow through channels present in a herringbone pattern causing rotational flow and folding the fluids around each other. This method can also comprise a surface for fluid mixing wherein the surface changes orientations during fluid cycling. Methods of generating LNPs using SHM include those disclosed in U.S. Pub. Nos. US20040262223 and US20120276209, each of which is incorporated herein by reference in their entirety.

[0678] In some embodiments, the polynucleotides described herein can be formulated in lipid nanoparticles using microfluidic technology (see Whitesides, George M., “The Origins and the Future of Microfluidics,” Nature 442: 368-373 (2006); and Abraham et al., “Chaotic Mixer for Microchannels,” Science 295: 647-651 (2002); each of which is herein incorporated by reference in its entirety). In some embodiments, the polynucleotides can be formulated in lipid nanoparticles using a micromixer chip such as, but not limited to, those from Harvard Apparatus (Holliston, MA) or Dolomite Microfluidics (Royston, UK). A micromixer chip can be used for rapid mixing of two or more fluid streams with a split and recombine mechanism.

[0679] In some embodiments, the polynucleotides described herein can be formulated in lipid nanoparticles having a diameter from about 1 nm to about 100 nm such as, but not limited to, about 1 nm to about 20 nm, from about 1 nm to about 30 nm, from about 1 nm to about 40 nm, from about 1 nm to about 50 nm, from about 1 nm to about 60 nm, from about 1 nm to about 70 nm, from about 1 nm to about 80 nm, from about 1 nm to about 90 nm, from about 5 nm to about from 100 nm, from about 5 nm to about 10 nm, about 5 nm to about 20 nm, from about 5 nm to about 30 nm, from about 5 nm to about 40 nm, from about 5 nm to about 50 nm, from about 5 nm to about 60 nm, from about 5 nm to about 70 nm, from about 5 nm to about 80 nm, from about 5 nm to about 90 nm, about 10 to about 20 nm, about 10 to about 30 nm, about 10 to about 40 nm, about 10 to about 50 nm, about 10 to about 60 nm, about 10 to about 70 nm, about 10 to about 80 nm, about 10 to about 90 nm, about 20 to about 30 nm, about 20 to about 40 nm, about 20 to about 50 nm, about 20 to about 60 nm, about 20 to about 70 nm, about 20 to about 80 nm, about 20 to about 90 nm, about 20 to about 100 nm, about 30 to about 40 nm, about 30 to about 50 nm, about 30 to about 60 nm, about 30 to about 70 nm, about 30 to about 80 nm, about 30 to about 90 nm, about 30 to about 100 nm, about 40 to about 50 nm, about 40 to about 60 nm, about 40 to about 70 nm, about 40 to about 80 nm, about 40 to about 90 nm, about 40 to about 100 nm, about 50 to about 60 nm, about 50 to about 70 nm about 50 to about 80 nm, about 50 to about 90 nm, about 50 to about 100 nm, about 60 to about 70 nm, about 60 to about 80 nm, about 60 to about 90 nm, about 60 to about 100 nm, about 70 to about 80 nm, about 70 to about 90 nm, about 70 to about 100 nm, about 80 to about 90 nm, about 80 to about 100 nm and/or about 90 to about 100 nm.

[0680] In some embodiments, the lipid nanoparticles can have a diameter from about 10 to 500 nm. In one embodiment, the lipid nanoparticle can have a diameter greater than 100 nm, greater than 150 nm, greater than 200 nm, greater than 250 nm, greater than 300 nm, greater than 350 nm, greater than 400 nm, greater than 450 nm, greater than 500 nm, greater than 550 nm, greater than 600 nm, greater than 650 nm, greater than 700 nm, greater than 750 nm, greater than 800 nm, greater than 850 nm, greater than 900 nm, greater than 950 nm or greater than 1000 nm.

[0681] In some embodiments, the polynucleotides can be delivered using smaller LNPs. Such particles can comprise a diameter from below 0.1 μm up to 100 nm such as, but not limited to, less than 0.1 μm, less than 1.0 μm, less than 5 μm, less than 10 μm, less than 15 um, less than 20 um, less than 25 um, less than 30 um, less than 35 um, less than 40 um, less than 50 um, less than 55 um, less than 60 um, less than 65 um, less than 70 um, less than 75 um, less than 80 um, less than 85 um, less than 90 um, less than 95 um, less than 100 um, less than 125 um, less than 150 um, less than 175 um, less than 200 um, less than 225 um, less than 250 um, less than 275 um, less than 300 um, less than 325 um, less than 350 um, less than 375 um, less than 400 um, less than 425 um, less than 450 um, less than 475 um, less than 500 um, less than 525 um, less than 550 um, less than 575 um, less than 600 um, less than 625 um, less than 650 um, less than 675 um, less than 700 um, less than 725 um, less than 750 um, less than 775 um, less than 800 um, less than 825 um, less than 850 um, less than 875 um, less than 900 um, less than 925 um, less than 950 um, or less than 975 um.

[0682] The nanoparticles and microparticles described herein can be geometrically engineered to modulate macrophage and/or the immune response. The geometrically engineered particles can have varied shapes, sizes and/or surface charges to incorporate the polynucleotides described herein for targeted delivery such as, but not limited to, pulmonary delivery (see, e.g., Intl. Pub. No. WO2013082111, herein incorporated by reference in its entirety). Other physical features the geometrically engineering particles can include, but are not limited to, fenestrations, angled arms, asymmetry and surface roughness, charge that can alter the interactions with cells and tissues.

[0683] In some embodiment, the nanoparticles described herein are stealth nanoparticles or target-specific stealth nanoparticles such as, but not limited to, those described in U.S. Pub. No. US20130172406, herein incorporated by reference in its entirety. The stealth or target-specific stealth nanoparticles can comprise a polymeric matrix, which can comprise two or more polymers such as, but not limited to, polyethylenes, polycarbonates, polyanhydrides, polyhydroxyacids, polypropylfumerates, polycaprolactones, polyamides, polyacetals, polyethers, polyesters, poly(orthoesters), polycyanoacrylates, polyvinyl alcohols, polyurethanes, polyphosphazenes, polyacrylates, polymethacrylates, polycyanoacrylates, polyureas, polystyrenes, polyamines, polyesters, polyanhydrides, polyethers, polyurethanes, polymethacrylates, polyacrylates, polycyanoacrylates, or combinations thereof.

### Lipidoids

[0684] In some embodiments, the compositions or formulations of the present disclosure comprise a delivery agent, e.g., a lipidoid. The polynucleotides described herein (e.g., a polynucleotide comprising a nucleotide sequence encoding an ABCB4, ABCB11, or ATP8B1 polypeptide) can be formulated with lipidoids. Complexes, micelles, liposomes or particles can be prepared containing these lipidoids and therefore to achieve an effective delivery of the polynucleotide(s), as judged by the production of an encoded protein(s), following the injection of a lipidoid formulation via localized and/or systemic routes of administration. Lipidoid complexes of polynucleotides can be administered by various means including, but not limited to, intravenous, intramuscular, or subcutaneous routes. The synthesis of lipidoids is described in literature (see Mahon et al., Bioconjug. Chem. 2010 21:1448-1454; Schroeder et al., J Intern Med. 2010 267:9-21; Akinc et al., Nat Biotechnol. 2008 26:561-569; Love et al., Proc Natl Acad Sci USA. 2010 107:1864-1869; Siegwart et al., Proc Natl Acad Sci USA. 2011 108:12996-3001; all of which are incorporated herein in their entireties).

[0685] Formulations with the different lipidoids, including, but not limited to penta[3-(1-laurylaminopropionyl)]-triethylenetetramine hydrochloride (TETA-5LAP; also known as 98N12-5, see Murugaiah et al., Analytical Biochemistry, 401:61 (2010)), C12-200 (including derivatives and variants), and MD1, can be tested for in vivo activity. The lipidoid “98N12-5” is disclosed by Akinc et al., Mol Ther. 2009 17:872-879. The lipidoid “C12-200” is disclosed by Love et al., Proc Natl Acad Sci USA. 2010 107:1864-1869 and Liu and Huang, Molecular Therapy. 2010 669-670. Each of the references is herein incorporated by reference in its entirety.

[0686] In one embodiment, the polynucleotides described herein can be formulated in an aminoalcohol lipidoid. Aminoalcohol lipidoids can be prepared by the methods described in U.S. Pat. No. 8,450,298 (herein incorporated by reference in its entirety).

[0687] The lipidoid formulations can include particles comprising either 3 or 4 or more components in addition to polynucleotides. Lipidoids and polynucleotide formulations comprising lipidoids are described in Intl. Pub. No. WO 2015051214 (herein incorporated by reference in its entirety.

### Hyaluronidase

[0688] In some embodiments, the polynucleotides described herein (e.g., a polynucleotide comprising a nucleotide sequence encoding an ABCB4, ABCB11, or ATP8B1 polypeptide) and hyaluronidase for injection (e.g., intramuscular or subcutaneous injection). Hyaluronidase catalyzes the hydrolysis of hyaluronan, which is a constituent of the interstitial barrier. Hyaluronidase lowers the viscosity of hyaluronan, thereby increases tissue permeability (Frost, Expert Opin. Drug Deliv. (2007) 4:427-440). Alternatively, the hyaluronidase can be used to increase the number of cells exposed to the polynucleotides administered intramuscularly, or subcutaneously.

### Nanoparticle Mimics

[0689] In some embodiments, the polynucleotides described herein (e.g., a polynucleotide comprising a nucleotide sequence encoding an ABCB4, ABCB11, or ATP8B1 polypeptide) are encapsulated within and/or absorbed to a nanoparticle mimic. A nanoparticle mimic can mimic the delivery function organisms or particles such as, but not limited to, pathogens, viruses, bacteria, fungus, parasites, prions and cells. As a non-limiting example, the polynucleotides described herein can be encapsulated in a non-viron particle that can mimic the delivery function of a virus (see e.g., Intl. Pub. No. WO2012006376 and U.S. Pub. Nos. US20130171241 and US20130195968, each of which is herein incorporated by reference in its entirety).

### Self-Assembled Nanoparticles, or Self-Assembled Macromolecules

[0690] In some embodiments, the compositions or formulations of the present disclosure comprise the polynucleotides described herein (e.g., a polynucleotide comprising a nucleotide sequence encoding an ABCB4, ABCB11, or ATP8B1 polypeptide) in self-assembled nanoparticles, or amphiphilic macromolecules (AMs) for delivery. AMs comprise biocompatible amphiphilic polymers that have an alkylated sugar backbone covalently linked to poly(ethylene glycol). In aqueous solution, the AMs self-assemble to form micelles. Nucleic acid self-assembled nanoparticles are described in Intl. Appl. No. PCT/US2014/027077, and AMs and methods of forming AMs are described in U.S. Pub. No. US20130217753, each of which is herein incorporated by reference in its entirety.

### Cations and Anions

[0691] In some embodiments, the compositions or formulations of the present disclosure comprise the polynucleotides described herein (e.g., a polynucleotide comprising a nucleotide sequence encoding an ABCB4, ABCB11, or ATP8B1 polypeptide) and a cation or anion, such as Zn²⁺, Ca²⁺, Cu²⁺, Mg²⁺ and combinations thereof. Exemplary formulations can include polymers and a polynucleotide complexed with a metal cation as described in, e.g., U.S. Pat. Nos. 6,265,389 and 6,555,525, each of which is herein incorporated by reference in its entirety. In some embodiments, cationic nanoparticles can contain a combination of divalent and monovalent cations. The delivery of polynucleotides in cationic nanoparticles or in one or more depot comprising cationic nanoparticles can improve polynucleotide bioavailability by acting as a long-acting depot and/or reducing the rate of degradation by nucleases.

### Amino Acid Lipids

[0692] In some embodiments, the compositions or formulations of the present disclosure comprise the polynucleotides described herein (e.g., a polynucleotide comprising a nucleotide sequence encoding an ABCB4, ABCB11, or ATP8B1 polypeptide) that is in formulation with an amino acid lipid. Amino acid lipids are lipophilic compounds comprising an amino acid residue and one or more lipophilic tails. Non-limiting examples of amino acid lipids and methods of making amino acid lipids are described in U.S. Pat. No. 8,501,824. The amino acid lipid formulations can deliver a polynucleotide in releasable form that comprises an amino acid lipid that binds and releases the polynucleotides. As a non-limiting example, the release of the polynucleotides described herein can be provided by an acid-labile linker as described in, e.g., U.S. Pat. Nos. 7,098,032, 6,897,196, 6,426,086, 7,138,382, 5,563,250, and 5,505,931, each of which is herein incorporated by reference in its entirety.

### Interpolyelectrolyte Complexes

[0693] In some embodiments, the compositions or formulations of the present disclosure comprise the polynucleotides described herein (e.g., a polynucleotide comprising a nucleotide sequence encoding an ABCB4, ABCB11, or ATP8B1 polypeptide) in an interpolyelectrolyte complex. Interpolyelectrolyte complexes are formed when charge-dynamic polymers are complexed with one or more anionic molecules. Non-limiting examples of charge-dynamic polymers and interpolyelectrolyte complexes and methods of making interpolyelectrolyte complexes are described in U.S. Pat. No. 8,524,368, herein incorporated by reference in its entirety.

### Crystalline Polymeric Systems

[0694] In some embodiments, the compositions or formulations of the present disclosure comprise the polynucleotides described herein (e.g., a polynucleotide comprising a nucleotide sequence encoding an ABCB4, ABCB11, or ATP8B1 polypeptide) in crystalline polymeric systems. Crystalline polymeric systems are polymers with crystalline moieties and/or terminal units comprising crystalline moieties. Exemplary polymers are described in U.S. Pat. No. 8,524,259 (herein incorporated by reference in its entirety).

### Polymers, Biodegradable Nanoparticles, and Core-Shell Nanoparticles

[0695] In some embodiments, the compositions or formulations of the present disclosure comprise the polynucleotides described herein (e.g., a polynucleotide comprising a nucleotide sequence encoding an ABCB4, ABCB11, or ATP8B1 polypeptide) and a natural and/or synthetic polymer. The polymers include, but not limited to, polyethenes, polyethylene glycol (PEG), poly(l-lysine)(PLL), PEG grafted to PLL, cationic lipopolymer, biodegradable cationic lipopolymer, polyethyleneimine (PEI), cross-linked branched poly(alkylene imines), a polyamine derivative, a modified poloxamer, elastic biodegradable polymer, biodegradable copolymer, biodegradable polyester copolymer, biodegradable polyester copolymer, multiblock copolymers, poly[α-(4-aminobutyl)-L-glycolic acid) (PAGA), biodegradable cross-linked cationic multi-block copolymers, polycarbonates, polyanhydrides, polyhydroxyacids, polypropylfumerates, polycaprolactones, polyamides, polyacetals, polyethers, polyesters, poly(orthoesters), polycyanoacrylates, polyvinyl alcohols, polyurethanes, polyphosphazenes, polyureas, polystyrenes, polyamines, polylysine, poly(ethylene imine), poly(serine ester), poly(L-lactide-co-L-lysine), poly(4-hydroxy-L-proline ester), amine-containing polymers, dextran polymers, dextran polymer derivatives or combinations thereof.

[0696] Exemplary polymers include, DYNAMIC POLYCONJUGATE® (Arrowhead Research Corp., Pasadena, Calif.) formulations from MIRUS® Bio (Madison, Wis.) and Roche Madison (Madison, Wis.), PHASERX™ polymer formulations such as, without limitation, SMARTT POLYMER TECHNOLOGY™ (PHASERX®, Seattle, Wash.), DMRI/DOPE, poloxamer, VAXFECTIN® adjuvant from Vical (San Diego, Calif.), chitosan, cyclodextrin from Calando Pharmaceuticals (Pasadena, Calif.), dendrimers and poly(lactic-co-glycolic acid) (PLGA) polymers. RONDEL™ (RNAi/Oligonucleotide Nanoparticle Delivery) polymers (Arrowhead Research Corporation, Pasadena, Calif.) and pH responsive co-block polymers such as PHASERX® (Seattle, Wash.).

[0697] The polymer formulations allow a sustained or delayed release of the polynucleotide (e.g., following intramuscular or subcutaneous injection). The altered release profile for the polynucleotide can result in, for example, translation of an encoded protein over an extended period of time. The polymer formulation can also be used to increase the stability of the polynucleotide. Sustained release formulations can include, but are not limited to, PLGA microspheres, ethylene vinyl acetate (EVAc), poloxamer, GELSITE® (Nanotherapeutics, Inc. Alachua, Fla.), HYLENEX® (Halozyme Therapeutics, San Diego Calif.), surgical sealants such as fibrinogen polymers (Ethicon Inc. Cornelia, Ga.), TISSELL® (Baxter International, Inc. Deerfield, Ill.), PEG-based sealants, and COSEAL® (Baxter International, Inc. Deerfield, Ill.).

[0698] As a non-limiting example modified mRNA can be formulated in PLGA microspheres by preparing the PLGA microspheres with tunable release rates (e.g., days and weeks) and encapsulating the modified mRNA in the PLGA microspheres while maintaining the integrity of the modified mRNA during the encapsulation process. EVAc are non-biodegradable, biocompatible polymers that are used extensively in pre-clinical sustained release implant applications (e.g., extended release products Ocusert a pilocarpine ophthalmic insert for glaucoma or progestasert a sustained release progesterone intrauterine device; transdermal delivery systems Testoderm, Duragesic and Selegiline; catheters). Poloxamer F-407 NF is a hydrophilic, non-ionic surfactant triblock copolymer of polyoxyethylene-polyoxypropylene-polyoxyethylene having a low viscosity at temperatures less than 5° C. and forms a solid gel at temperatures greater than 15° C.

[0699] As a non-limiting example, the polynucleotides described herein can be formulated with the polymeric compound of PEG grafted with PLL as described in U.S. Pat. No. 6,177,274. As another non-limiting example, the polynucleotides described herein can be formulated with a block copolymer such as a PLGA-PEG block copolymer (see e.g., U.S. Pub. No. US20120004293 and U.S. Pat. Nos. 8,236,330 and 8,246,968), or a PLGA-PEG-PLGA block copolymer (see e.g., U.S. Pat. No. 6,004,573). Each of the references is herein incorporated by reference in its entirety.

[0700] In some embodiments, the polynucleotides described herein can be formulated with at least one amine-containing polymer such as, but not limited to polylysine, polyethylene imine, poly(amidoamine) dendrimers, poly(amine-co-esters) or combinations thereof. Exemplary polyamine polymers and their use as delivery agents are described in, e.g., U.S. Pat. Nos. 8,460,696, 8,236,280, each of which is herein incorporated by reference in its entirety.

[0701] In some embodiments, the polynucleotides described herein can be formulated in a biodegradable cationic lipopolymer, a biodegradable polymer, or a biodegradable copolymer, a biodegradable polyester copolymer, a biodegradable polyester polymer, a linear biodegradable copolymer, PAGA, a biodegradable cross-linked cationic multi-block copolymer or combinations thereof as described in, e.g., U.S. Pat. Nos. 6,696,038, 6,517,869, 6,267,987, 6,217,912, 6,652,886, 8,057,821, and 8,444,992; U.S. Pub. Nos. US20030073619, US20040142474, US20100004315, US2012009145 and US20130195920; and Intl Pub. Nos. WO2006063249 and WO2013086322, each of which is herein incorporated by reference in its entirety.

[0702] In some embodiments, the polynucleotides described herein can be formulated in or with at least one cyclodextrin polymer as described in U.S. Pub. No. US20130184453. In some embodiments, the polynucleotides described herein can be formulated in or with at least one crosslinked cation-binding polymers as described in Intl. Pub. Nos. WO2013106072, WO2013106073 and WO2013106086. In some embodiments, the polynucleotides described herein can be formulated in or with at least PEGylated albumin polymer as described in U.S. Pub. No. US20130231287. Each of the references is herein incorporated by reference in its entirety.

[0703] In some embodiments, the polynucleotides disclosed herein can be formulated as a nanoparticle using a combination of polymers, lipids, and/or other biodegradable agents, such as, but not limited to, calcium phosphate. Components can be combined in a core-shell, hybrid, and/or layer-by-layer architecture, to allow for fine-tuning of the nanoparticle for delivery (Wang et al., Nat Mater. 2006 5:791-796; Fuller et al., Biomaterials. 2008 29:1526-1532; DeKoker et al., Adv Drug Deliv Rev. 2011 63:748-761; Endres et al., Biomaterials. 2011 32:7721-7731; Su et al., Mol Pharm. 2011 Jun 6;8(3):774-87; herein incorporated by reference in their entireties). As a non-limiting example, the nanoparticle can comprise a plurality of polymers such as, but not limited to hydrophilic-hydrophobic polymers (e.g., PEG-PLGA), hydrophobic polymers (e.g., PEG) and/or hydrophilic polymers (Intl. Pub. No. WO20120225129, herein incorporated by reference in its entirety).

[0704] The use of core-shell nanoparticles has additionally focused on a high-throughput approach to synthesize cationic cross-linked nanogel cores and various shells (Siegwart et al., Proc Natl Acad Sci USA. 2011 108:12996-13001; herein incorporated by reference in its entirety). The complexation, delivery, and internalization of the polymeric nanoparticles can be precisely controlled by altering the chemical composition in both the core and shell components of the nanoparticle. For example, the core-shell nanoparticles can efficiently deliver siRNA to mouse hepatocytes after they covalently attach cholesterol to the nanoparticle.

[0705] In some embodiments, a hollow lipid core comprising a middle PLGA layer and an outer neutral lipid layer containing PEG can be used to delivery of the polynucleotides as described herein. In some embodiments, the lipid nanoparticles can comprise a core of the polynucleotides disclosed herein and a polymer shell, which is used to protect the polynucleotides in the core. The polymer shell can be any of the polymers described herein and are known in the art. The polymer shell can be used to protect the polynucleotides in the core.

[0706] Core-shell nanoparticles for use with the polynucleotides described herein are described in U.S. Pat. No. 8,313,777 or Intl. Pub. No. WO2013124867, each of which is herein incorporated by reference in their entirety.

### Peptides and Proteins

[0707] In some embodiments, the compositions or formulations of the present disclosure comprise the polynucleotides described herein (e.g., a polynucleotide comprising a nucleotide sequence encoding an ABCB4, ABCB11, or ATP8B1 polypeptide) that is formulated with peptides and/or proteins to increase transfection of cells by the polynucleotide(s), and/or to alter the biodistribution of the polynucleotide(s) (e.g., by targeting specific tissues or cell types), and/or increase the translation of encoded protein(s) (e.g., Intl. Pub. Nos. WO2012110636 and WO2013123298). In some embodiments, the peptides can be those described in U.S. Pub. Nos. US20130129726, US20130137644 and US20130164219. Each of the references is herein incorporated by reference in its entirety.

### Conjugates

[0708] In some embodiments, the compositions or formulations of the present disclosure comprise the polynucleotides described herein (e.g., a polynucleotide comprising a nucleotide sequence encoding an ABCB4, ABCB11, or ATP8B1 polypeptide) that are covalently linked to a carrier or targeting group, or including two encoding regions that together produce a fusion protein (e.g., bearing a targeting group and therapeutic protein or peptide) as a conjugate. The conjugate can be a peptide that selectively directs the nanoparticle to neurons in a tissue or organism, or assists in crossing the blood-brain barrier.

[0709] The conjugates include a naturally occurring substance, such as a protein (e.g., human serum albumin (HSA), low-density lipoprotein (LDL), high-density lipoprotein (HDL), or globulin); an carbohydrate (e.g., a dextran, pullulan, chitin, chitosan, inulin, cyclodextrin or hyaluronic acid); or a lipid. The ligand can also be a recombinant or synthetic molecule, such as a synthetic polymer, e.g., a synthetic polyamino acid, an oligonucleotide (e.g., an aptamer). Examples of polyamino acids include polyamino acid is a polylysine (PLL), poly L-aspartic acid, poly L-glutamic acid, styrene-maleic acid anhydride copolymer, poly(L-lactide-co-glycolied) copolymer, divinyl ether-maleic anhydride copolymer, N-(2-hydroxypropyl)methacrylamide copolymer (HMPA), polyethylene glycol (PEG), polyvinyl alcohol (PVA), polyurethane, poly(2-ethylacryllic acid), N-isopropylacrylamide polymers, or polyphosphazine. Example of polyamines include: polyethylenimine, polylysine (PLL), spermine, spermidine, polyamine, pseudopeptide-polyamine, peptidomimetic polyamine, dendrimer polyamine, arginine, amidine, protamine, cationic lipid, cationic porphyrin, quaternary salt of a polyamine, or an alpha helical peptide.

[0710] In some embodiments, the conjugate can function as a carrier for the polynucleotide disclosed herein. The conjugate can comprise a cationic polymer such as, but not limited to, polyamine, polylysine, polyalkylenimine, and polyethylenimine that can be grafted to with poly(ethylene glycol). Exemplary conjugates and their preparations are described in U.S. Pat. No. 6,586,524 and U.S. Pub. No. US20130211249, each of which herein is incorporated by reference in its entirety.

[0711] The conjugates can also include targeting groups, e.g., a cell or tissue targeting agent, e.g., a lectin, glycoprotein, lipid or protein, e.g., an antibody, that binds to a specified cell type such as a kidney cell. A targeting group can be a thyrotropin, melanotropin, lectin, glycoprotein, surfactant protein A, Mucin carbohydrate, multivalent lactose, multivalent galactose, N-acetyl-galactosamine, N-acetyl-glucosamine multivalent mannose, multivalent fucose, glycosylated polyaminoacids, multivalent galactose, transferrin, bisphosphonate, polyglutamate, polyaspartate, a lipid, cholesterol, a steroid, bile acid, folate, vitamin B12, biotin, an RGD peptide, an RGD peptide mimetic or an aptamer.

[0712] Targeting groups can be proteins, e.g., glycoproteins, or peptides, e.g., molecules having a specific affinity for a co-ligand, or antibodies e.g., an antibody, that binds to a specified cell type such as an endothelial cell or bone cell. Targeting groups can also include hormones and hormone receptors. They can also include non-peptidic species, such as lipids, lectins, carbohydrates, vitamins, cofactors, multivalent lactose, multivalent galactose, N-acetyl-galactosamine, N-acetyl-glucosamine multivalent mannose, multivalent frucose, or aptamers. The ligand can be, for example, a lipopolysaccharide, or an activator of p38 MAP kinase.

[0713] The targeting group can be any ligand that is capable of targeting a specific receptor. Examples include, without limitation, folate, GalNAc, galactose, mannose, mannose-6P, apatamers, integrin receptor ligands, chemokine receptor ligands, transferrin, biotin, serotonin receptor ligands, PSMA, endothelin, GCPII, somatostatin, LDL, and HDL ligands. In particular embodiments, the targeting group is an aptamer. The aptamer can be unmodified or have any combination of modifications disclosed herein. As a non-limiting example, the targeting group can be a glutathione receptor (GR)-binding conjugate for targeted delivery across the blood-central nervous system barrier as described in, e.g., U.S. Pub. No. US2013021661012 (herein incorporated by reference in its entirety).

[0714] In some embodiments, the conjugate can be a synergistic biomolecule-polymer conjugate, which comprises a long-acting continuous-release system to provide a greater therapeutic efficacy. The synergistic biomolecule-polymer conjugate can be those described in U.S. Pub. No. US20130195799. In some embodiments, the conjugate can be an aptamer conjugate as described in Intl. Pat. Pub. No. WO2012040524. In some embodiments, the conjugate can be an amine containing polymer conjugate as described in U.S. Pat. No. 8,507,653. Each of the references is herein incorporated by reference in its entirety. In some embodiments, the polynucleotides can be conjugated to SMARTT POLYMER TECHNOLOGY® (PHASERX®, Inc. Seattle, Wash.).

[0715] In some embodiments, the polynucleotides described herein are covalently conjugated to a cell penetrating polypeptide, which can also include a signal sequence or a targeting sequence. The conjugates can be designed to have increased stability, and/or increased cell transfection; and/or altered the biodistribution (e.g., targeted to specific tissues or cell types). In some embodiments, the polynucleotides described herein can be conjugated to an agent to enhance delivery. In some embodiments, the agent can be a monomer or polymer such as a targeting monomer or a polymer having targeting blocks as described in Intl. Pub. No. WO2011062965. In some embodiments, the agent can be a transport agent covalently coupled to a polynucleotide as described in, e.g., U.S. Pat. Nos. 6,835.393 and 7,374,778. In some embodiments, the agent can be a membrane barrier transport enhancing agent such as those described in U.S. Pat. Nos. 7,737,108 and 8,003,129. Each of the references is herein incorporated by reference in its entirety.

### Accelerated Blood Clearance

[0716] The disclosure provides compounds, compositions and methods of use thereof for reducing the effect of ABC on a repeatedly administered active agent such as a biologically active agent. As will be readily apparent, reducing or eliminating altogether the effect of ABC on an administered active agent effectively increases its half-life and thus its efficacy.

[0717] In some embodiments the term reducing ABC refers to any reduction in ABC in comparison to a positive reference control ABC inducing LNP such as an MC3 LNP. ABC inducing LNPs cause a reduction in circulating levels of an active agent upon a second or subsequent administration within a given time frame. Thus a reduction in ABC refers to less clearance of circulating agent upon a second or subsequent dose of agent, relative to a standard LNP. The reduction may be, for instance, at least 10%, 15%, 20%, 25%, 30%, 35%, 40%, 45%, 50%, 55%, 60%, 65%, 70%, 75%, 80%, 85%, 90%, 95%, 98%, or 100%. In some embodiments the reduction is 10-100%, 10-50%, 20-100%, 20-50%, 30-100%, 30-50%, 40%-100%, 40-80%, 50-90%, or 50-100%. Alternatively the reduction in ABC may be characterized as at least a detectable level of circulating agent following a second or subsequent administration or at least a 2 fold, 3 fold, 4 fold, 5 fold increase in circulating agent relative to circulating agent following administration of a standard LNP. In some embodiments the reduction is a 2-100 fold, 2-50 fold, 3-100 fold, 3-50 fold, 3-20 fold, 4-100 fold, 4-50 fold, 4-40 fold, 4-30 fold, 4-25 fold, 4-20 fold, 4-15 fold, 4-10 fold, 4-5 fold, 5-100 fold, 5-50 fold, 5-40 fold, 5-30 fold, 5-25 fold, 5-20 fold, 5-15 fold, 5-10 fold, 6-100 fold, 6-50 fold, 6-40 fold, 6-30 fold, 6-25 fold, 6-20 fold, 6-15 fold, 6-10 fold, 8-100 fold, 8-50 fold, 8-40 fold, 8-30 fold, 8-25 fold, 8-20 fold, 8-15 fold, 8-10 fold, 10-100 fold, 10-50 fold, 10-40 fold, 10-30 fold, 10-25 fold, 10-20 fold, 10-15 fold, 20-100 fold, 20-50 fold, 20-40 fold, 20-30 fold, or 20-25 fold.

[0718] The disclosure provides lipid-comprising compounds and compositions that are less susceptible to clearance and thus have a longer half-life in vivo. This is particularly the case where the compositions are intended for repeated including chronic administration, and even more particularly where such repeated administration occurs within days or weeks. Significantly, these compositions are less susceptible or altogether circumvent the observed phenomenon of accelerated blood clearance (ABC). ABC is a phenomenon in which certain exogenously administered agents are rapidly cleared from the blood upon second and subsequent administrations. This phenomenon has been observed, in part, for a variety of lipid-containing compositions including but not limited to lipidated agents, liposomes or other lipid-based delivery vehicles, and lipid-encapsulated agents. Heretofore, the basis of ABC has been poorly understood and in some cases attributed to a humoral immune response and accordingly strategies for limiting its impact in vivo particularly in a clinical setting have remained elusive.

[0719] This disclosure provides compounds and compositions that are less susceptible, if at all susceptible, to ABC. In some important aspects, such compounds and compositions are lipid-comprising compounds or compositions. The lipid-containing compounds or compositions of this disclosure, surprisingly, do not experience ABC upon second and subsequent administration in vivo. This resistance to ABC renders these compounds and compositions particularly suitable for repeated use in vivo, including for repeated use within short periods of time, including days or 1-2 weeks. This enhanced stability and/or half-life is due, in part, to the inability of these compositions to activate Bla and/or B lb cells and/or conventional B cells, pDCs and/or platelets.

[0720] This disclosure therefore provides an elucidation of the mechanism underlying accelerated blood clearance (ABC). It has been found, in accordance with this disclosure and the inventions provided herein, that the ABC phenomenon at least as it relates to lipids and lipid nanoparticles is mediated, at least in part an innate immune response involving Bla and/or B1b cells, pDC and/or platelets. B1a cells are normally responsible for secreting natural antibody, in the form of circulating IgM. This IgM is poly-reactive, meaning that it is able to bind to a variety of antigens, albeit with a relatively low affinity for each.

[0721] It has been found in accordance with the invention that some lipidated agents or lipid-comprising formulations such as lipid nanoparticles administered in vivo trigger and are subject to ABC. It has now been found in accordance with the invention that upon administration of a first dose of the LNP, one or more cells involved in generating an innate immune response (referred to herein as sensors) bind such agent, are activated, and then initiate a cascade of immune factors (referred to herein as effectors) that promote ABC and toxicity. For instance, B1a and B1b cells may bind to LNP, become activated (alone or in the presence of other sensors such as pDC and/or effectors such as IL6) and secrete natural IgM that binds to the LNP. Pre-existing natural IgM in the subject may also recognize and bind to the LNP, thereby triggering complement fixation. After administration of the first dose, the production of natural IgM begins within 1-2 hours of administration of the LNP. Typically, by about 2-3 weeks the natural IgM is cleared from the system due to the natural half-life of IgM. Natural IgG is produced beginning around 96 hours after administration of the LNP. The agent, when administered in a naive setting, can exert its biological effects relatively unencumbered by the natural IgM produced post-activation of the B1a cells or B1b cells or natural IgG. The natural IgM and natural IgG are non-specific and thus are distinct from anti-PEG IgM and anti-PEG IgG.

[0722] Although Applicant is not bound by mechanism, it is proposed that LNPs trigger ABC and/or toxicity through the following mechanisms. It is believed that when an LNP is administered to a subject the LNP is rapidly transported through the blood to the spleen. The LNPs may encounter immune cells in the blood and/or the spleen. A rapid innate immune response is triggered in response to the presence of the LNP within the blood and/or spleen. Applicant has shown herein that within hours of administration of an LNP several immune sensors have reacted to the presence of the LNP. These sensors include but are not limited to immune cells involved in generating an immune response, such as B cells, pDC, and platelets. The sensors may be present in the spleen, such as in the marginal zone of the spleen and/or in the blood. The LNP may physically interact with one or more sensors, which may interact with other sensors. In such a case the LNP is directly or indirectly interacting with the sensors. The sensors may interact directly with one another in response to recognition of the LNP. For instance, many sensors are located in the spleen and can easily interact with one another. Alternatively, one or more of the sensors may interact with LNP in the blood and become activated. The activated sensor may then interact directly with other sensors or indirectly (e.g., through the stimulation or production of a messenger such as a cytokine e.g., IL6).

[0723] In some embodiments the LNP may interact directly with and activate each of the following sensors: pDC, B1a cells, B1b cells, and platelets. These cells may then interact directly or indirectly with one another to initiate the production of effectors which ultimately lead to the ABC and/or toxicity associated with repeated doses of LNP. For instance, Applicant has shown that LNP administration leads to pDC activation, platelet aggregation and activation and B cell activation. In response to LNP platelets also aggregate and are activated and aggregate with B cells. pDC cells are activated. LNP has been found to interact with the surface of platelets and B cells relatively quickly. Blocking the activation of any one or combination of these sensors in response to LNP is useful for dampening the immune response that would ordinarily occur. This dampening of the immune response results in the avoidance of ABC and/or toxicity.

[0724] The sensors once activated produce effectors. An effector, as used herein, is an immune molecule produced by an immune cell, such as a B cell. Effectors include but are not limited to immunoglobulin such as natural IgM and natural IgG and cytokines such as IL6. B1a and B1b cells stimulate the production of natural IgMs within 2-6 hours following administration of an LNP. Natural IgG can be detected within 96 hours. IL6 levels are increased within several hours. The natural IgM and IgG circulate in the body for several days to several weeks. During this time the circulating effectors can interact with newly administered LNPs, triggering those LNPs for clearance by the body. For instance, an effector may recognize and bind to an LNP. The Fc region of the effector may be recognized by and trigger uptake of the decorated LNP by macrophage. The macrophages are then transported to the spleen. The production of effectors by immune sensors is a transient response that correlates with the timing observed for ABC.

[0725] If the administered dose is the second or subsequent administered dose, and if such second or subsequent dose is administered before the previously induced natural IgM and/or IgG is cleared from the system (e.g., before the 2-3 window time period), then such second or subsequent dose is targeted by the circulating natural IgM and/or natural IgG or Fc which trigger alternative complement pathway activation and is itself rapidly cleared. When LNP are administered after the effectors have cleared from the body or are reduced in number, ABC is not observed.

[0726] Thus, it is useful according to aspects of the invention to inhibit the interaction between LNP and one or more sensors, to inhibit the activation of one or more sensors by LNP (direct or indirect), to inhibit the production of one or more effectors, and/or to inhibit the activity of one or more effectors. In some embodiments the LNP is designed to limit or block interaction of the LNP with a sensor. For instance the LNP may have an altered PC and/or PEG to prevent interactions with sensors. Alternatively or additionally an agent that inhibits immune responses induced by LNPs may be used to achieve any one or more of these effects.

[0727] It has also been determined that conventional B cells are also implicated in ABC. Specifically, upon first administration of an agent, conventional B cells, referred to herein as CD19(+), bind to and react against the agent. Unlike Bla and B lb cells though, conventional B cells are able to mount first an IgM response (beginning around 96 hours after administration of the LNPs) followed by an IgG response (beginning around 14 days after administration of the LNPs) concomitant with a memory response. Thus conventional B cells react against the administered agent and contribute to IgM (and eventually IgG) that mediates ABC. The IgM and IgG are typically anti-PEG IgM and anti-PEG IgG.

[0728] It is contemplated that in some instances, the majority of the ABC response is mediated through Bla cells and Bla-mediated immune responses. It is further contemplated that in some instances, the ABC response is mediated by both IgM and IgG, with both conventional B cells and Bla cells mediating such effects. In yet still other instances, the ABC response is mediated by natural IgM molecules, some of which are capable of binding to natural IgM, which may be produced by activated Bla cells. The natural IgMs may bind to one or more components of the LNPs, e.g., binding to a phospholipid component of the LNPs (such as binding to the PC moiety of the phospholipid) and/or binding to a PEG-lipid component of the LNPs (such as binding to PEG-DMG, in particular, binding to the PEG moiety of PEG-DMG). Since Bla expresses CD36, to which phosphatidylcholine is a ligand, it is contemplated that the CD36 receptor may mediate the activation of Bla cells and thus production of natural IgM. In yet still other instances, the ABC response is mediated primarily by conventional B cells.

[0729] It has been found in accordance with the invention that the ABC phenomenon can be reduced or abrogated, at least in part, through the use of compounds and compositions (such as agents, delivery vehicles, and formulations) that do not activate Bla cells. Compounds and compositions that do not activate Bla cells may be referred to herein as Bla inert compounds and compositions. It has been further found in accordance with the invention that the ABC phenomenon can be reduced or abrogated, at least in part, through the use of compounds and compositions that do not activate conventional B cells. Compounds and compositions that do not activate conventional B cells may in some embodiments be referred to herein as CD19-inert compounds and compositions. Thus, in some embodiments provided herein, the compounds and compositions do not activate B1a cells and they do not activate conventional B cells. Compounds and compositions that do not activate B1a cells and conventional B cells may in some embodiments be referred to herein as B1a/CD19-inert compounds and compositions.

[0730] These underlying mechanisms were not heretofore understood, and the role of B1a and B1b cells and their interplay with conventional B cells in this phenomenon was also not appreciated.

[0731] Accordingly, this disclosure provides compounds and compositions that do not promote ABC. These may be further characterized as not capable of activating B1a and/or B1b cells, platelets and/or pDC, and optionally conventional B cells also. These compounds (e.g., agents, including biologically active agents such as prophylactic agents, therapeutic agents and diagnostic agents, delivery vehicles, including liposomes, lipid nanoparticles, and other lipid-based encapsulating structures, etc.) and compositions (e.g., formulations, etc.) are particularly desirable for applications requiring repeated administration, and in particular repeated administrations that occur within with short periods of time (e.g., within 1-2 weeks). This is the case, for example, if the agent is a nucleic acid based therapeutic that is provided to a subject at regular, closely-spaced intervals. The findings provided herein may be applied to these and other agents that are similarly administered and/or that are subject to ABC.

[0732] Of particular interest are lipid-comprising compounds, lipid-comprising particles, and lipid-comprising compositions as these are known to be susceptible to ABC. Such lipid-comprising compounds particles, and compositions have been used extensively as biologically active agents or as delivery vehicles for such agents. Thus, the ability to improve their efficacy of such agents, whether by reducing the effect of ABC on the agent itself or on its delivery vehicle, is beneficial for a wide variety of active agents.

[0733] Also provided herein are compositions that do not stimulate or boost an acute phase response (ARP) associated with repeat dose administration of one or more biologically active agents.

[0734] The composition, in some instances, may not bind to IgM, including but not limited to natural IgM.

[0735] The composition, in some instances, may not bind to an acute phase protein such as but not limited to C-reactive protein.

[0736] The composition, in some instances, may not trigger a CD5(+) mediated immune response. As used herein, a CD5(+) mediated immune response is an immune response that is mediated by B1a and/or B1b cells. Such a response may include an ABC response, an acute phase response, induction of natural IgM and/or IgG, and the like.

[0737] The composition, in some instances, may not trigger a CD19(+) mediated immune response. As used herein, a CD19(+) mediated immune response is an immune response that is mediated by conventional CD19(+), CD5(−) B cells. Such a response may include induction of IgM, induction of IgG, induction of memory B cells, an ABC response, an anti-drug antibody (ADA) response including an anti-protein response where the protein may be encapsulated within an LNP, and the like.

[0738] B1a cells are a subset of B cells involved in innate immunity. These cells are the source of circulating IgM, referred to as natural antibody or natural serum antibody. Natural IgM antibodies are characterized as having weak affinity for a number of antigens, and therefore they are referred to as “poly-specific” or “poly-reactive”, indicating their ability to bind to more than one antigen. B1a cells are not able to produce IgG. Additionally, they do not develop into memory cells and thus do not contribute to an adaptive immune response. However, they are able to secrete IgM upon activation. The secreted IgM is typically cleared within about 2-3 weeks, at which point the immune system is rendered relatively naïve to the previously administered antigen. If the same antigen is presented after this time period (e.g., at about 3 weeks after the initial exposure), the antigen is not rapidly cleared. However, significantly, if the antigen is presented within that time period (e.g., within 2 weeks, including within 1 week, or within days), then the antigen is rapidly cleared. This delay between consecutive doses has rendered certain lipid-containing therapeutic or diagnostic agents unsuitable for use.

[0739] In humans, B1a cells are CD19(+), CD20(+), CD27(+), CD43(+), CD70(−) and CD5(+). In mice, B1a cells are CD19(+), CD5(+), and CD45 B cell isoform B220(+). It is the expression of CD5 which typically distinguishes B1a cells from other convention B cells. B1a cells may express high levels of CD5, and on this basis may be distinguished from other B-1 cells such as B-lb cells which express low or undetectable levels of CD5. CD5 is a pan-T cell surface glycoprotein. B1a cells also express CD36, also known as fatty acid translocase. CD36 is a member of the class B scavenger receptor family. CD36 can bind many ligands, including oxidized low density lipoproteins, native lipoproteins, oxidized phospholipids, and long-chain fatty acids.

[0740] B1b cells are another subset of B cells involved in innate immunity. These cells are another source of circulating natural IgM. Several antigens, including PS, are capable of inducing T cell independent immunity through B1b activation. CD27 is typically upregulated on B1b cells in response to antigen activation. Similar to B1a cells, the B1b cells are typically located in specific body locations such as the spleen and peritoneal cavity and are in very low abundance in the blood. The B1b secreted natural IgM is typically cleared within about 2-3 weeks, at which point the immune system is rendered relatively naïve to the previously administered antigen. If the same antigen is presented after this time period (e.g., at about 3 weeks after the initial exposure), the antigen is not rapidly cleared. However, significantly, if the antigen is presented within that time period (e.g., within 2 weeks, including within 1 week, or within days), then the antigen is rapidly cleared. This delay between consecutive doses has rendered certain lipid-containing therapeutic or diagnostic agents unsuitable for use.

[0741] In some embodiments it is desirable to block B1a and/or B1b cell activation. One strategy for blocking B1a and/or B1b cell activation involves determining which components of a lipid nanoparticle promote B cell activation and neutralizing those components. It has been discovered herein that at least PEG and phosphatidylcholine (PC) contribute to B1a and B1b cell interaction with other cells and/or activation. PEG may play a role in promoting aggregation between B1 cells and platelets, which may lead to activation. PC (a helper lipid in LNPs) is also involved in activating the B1 cells, likely through interaction with the CD36 receptor on the B cell surface. Numerous particles have PEG-lipid alternatives, PEG-less, and/or PC replacement lipids (e.g. oleic acid or analogs thereof) have been designed and tested. Applicant has established that replacement of one or more of these components within an LNP that otherwise would promote ABC upon repeat administration, is useful in preventing ABC by reducing the production of natural IgM and/or B cell activation. Thus, the invention encompasses LNPs that have reduced ABC as a result of a design which eliminates the inclusion of B cell triggers.

[0742] Another strategy for blocking B1a and/or B1b cell activation involves using an agent that inhibits immune responses induced by LNPs. These types of agents are discussed in more detail below. In some embodiments these agents block the interaction between B1a/B1b cells and the LNP or platelets or pDC. For instance, the agent may be an antibody or other binding agent that physically blocks the interaction. An example of this is an antibody that binds to CD36 or CD6. The agent may also be a compound that prevents or disables the B1a/B1b cell from signaling once activated or prior to activation. For instance, it is possible to block one or more components in the B1a/B1b signaling cascade the results from B cell interaction with LNP or other immune cells. In other embodiments the agent may act one or more effectors produced by the B1a/B1b cells following activation. These effectors include for instance, natural IgM and cytokines.

[0743] It has been demonstrated according to aspects of the invention that when activation of pDC cells is blocked, B cell activation in response to LNP is decreased. Thus, in order to avoid ABC and/or toxicity, it may be desirable to prevent pDC activation. Similar to the strategies discussed above, pDC cell activation may be blocked by agents that interfere with the interaction between pDC and LNP and/or B cells/platelets. Alternatively, agents that act on the pDC to block its ability to get activated or on its effectors can be used together with the LNP to avoid ABC.

[0744] Platelets may also play an important role in ABC and toxicity. Very quickly after a first dose of LNP is administered to a subject platelets associate with the LNP, aggregate and are activated. In some embodiments it is desirable to block platelet aggregation and/or activation. One strategy for blocking platelet aggregation and/or activation involves determining which components of a lipid nanoparticle promote platelet aggregation and/or activation and neutralizing those components. It has been discovered herein that at least PEG contribute to platelet aggregation, activation and/or interaction with other cells. Numerous particles have PEG-lipid alternatives and PEG-less have been designed and tested. Applicant has established that replacement of one or more of these components within an LNP that otherwise would promote ABC upon repeat administration, is useful in preventing ABC by reducing the production of natural IgM and/or platelet aggregation. Thus, the invention encompasses LNPs that have reduced ABC as a result of a design which eliminates the inclusion of platelet triggers. Alternatively agents that act on the platelets to block its activity once it is activated or on its effectors can be used together with the LNP to avoid ABC.

### Measuring ABC Activity and Related Activities

[0745] Various compounds and compositions provided herein, including LNPs, do not promote ABC activity upon administration in vivo. These LNPs may be characterized and/or identified through any of a number of assays, such as but not limited to those described below, as well as any of the assays disclosed in the Examples section, include the methods subsection of the Examples.

[0746] In some embodiments the methods involve administering an LNP without producing an immune response that promotes ABC. An immune response that promotes ABC involves activation of one or more sensors, such as B1 cells, pDC, or platelets, and one or more effectors, such as natural IgM, natural IgG or cytokines such as IL6. Thus administration of an LNP without producing an immune response that promotes ABC, at a minimum involves administration of an LNP without significant activation of one or more sensors and significant production of one or more effectors. Significant used in this context refers to an amount that would lead to the physiological consequence of accelerated blood clearance of all or part of a second dose with respect to the level of blood clearance expected for a second dose of an ABC triggering LNP. For instance, the immune response should be dampened such that the ABC observed after the second dose is lower than would have been expected for an ABC triggering LNP.

### B1a or B1b Activation Assay

[0747] Certain compositions provided in this disclosure do not activate B cells, such as B1a or B1b cells (CD19+CD5+) and/or conventional B cells (CD19+CD5−). Activation of B1a cells, B1b cells, or conventional B cells may be determined in a number of ways, some of which are provided below. B cell population may be provided as fractionated B cell populations or unfractionated populations of splenocytes or peripheral blood mononuclear cells (PBMC). If the latter, the cell population may be incubated with the LNP of choice for a period of time, and then harvested for further analysis. Alternatively, the supernatant may be harvested and analyzed.

### Upregulation of Activation Marker Cell Surface Expression

[0748] Activation of B1a cells, B1b cells, or conventional B cells may be demonstrated as increased expression of B cell activation markers including late activation markers such as CD86. In an exemplary non-limiting assay, unfractionated B cells are provided as a splenocyte population or as a PBMC population, incubated with an LNP of choice for a particular period of time, and then stained for a standard B cell marker such as CD19 and for an activation marker such as CD86, and analyzed using for example flow cytometry. A suitable negative control involves incubating the same population with medium, and then performing the same staining and visualization steps. An increase in CD86 expression in the test population compared to the negative control indicates B cell activation.

### Pro-Inflammatory Cytokine Release

[0749] B cell activation may also be assessed by cytokine release assay. For example, activation may be assessed through the production and/or secretion of cytokines such as IL-6 and/or TNF-alpha upon exposure with LNPs of interest.

[0750] Such assays may be performed using routine cytokine secretion assays well known in the art. An increase in cytokine secretion is indicative of B cell activation.

LNP Binding/Association to and/or Uptake by B Cells

[0751] LNP association or binding to B cells may also be used to assess an LNP of interest and to further characterize such LNP. Association/binding and/or uptake/internalization may be assessed using a detectably labeled, such as fluorescently labeled, LNP and tracking the location of such LNP in or on B cells following various periods of incubation. The invention further contemplates that the compositions provided herein may be capable of evading recognition or detection and optionally binding by downstream mediators of ABC such as circulating IgM and/or acute phase response mediators such as acute phase proteins (e.g., C-reactive protein (CRP).

### Methods of Use for Reducing ABC

[0752] Also provided herein are methods for delivering LNPs, which may encapsulate an agent such as a therapeutic agent, to a subject without promoting ABC.

[0753] In some embodiments, the method comprises administering any of the LNPs described herein, which do not promote ABC, for example, do not induce production of natural IgM binding to the LNPs, do not activate B1a and/or B1b cells. As used herein, an LNP that “does not promote ABC” refers to an LNP that induces no immune responses that would lead to substantial ABC or a substantially low level of immune responses that is not sufficient to lead to substantial ABC. An LNP that does not induce the production of natural IgMs binding to the LNP refers to LNPs that induce either no natural IgM binding to the LNPs or a substantially low level of the natural IgM molecules, which is insufficient to lead to substantial ABC. An LNP that does not activate B1a and/or B1b cells refer to LNPs that induce no response of B1a and/or B1b cells to produce natural IgM binding to the LNPs or a substantially low level of B1a and/or B1b responses, which is insufficient to lead to substantial ABC.

[0754] In some embodiments, the terms do not activate and do not induce production are a relative reduction to a reference value or condition. In some embodiments the reference value or condition is the amount of activation or induction of production of a molecule such as IgM by a standard LNP such as an MC3 LNP. In some embodiments the relative reduction is a reduction of at least 30%, for example at least 30%, 35%, 40%, 45%, 50%, 55%, 60%, 65%, 70%, 75%, 80%, 85%, 90%, 91%, 92%, 93%, 94%, 95%, 96%, 97%, 98%, 99%, or 100%. In other embodiments the terms do not activate cells such as B cells and do not induce production of a protein such as IgM may refer to an undetectable amount of the active cells or the specific protein.

### Platelet Effects and Toxicity

[0755] The invention is further premised in part on the elucidation of the mechanism underlying dose-limiting toxicity associated with LNP administration. Such toxicity may involve coagulopathy, disseminated intravascular coagulation (DIC, also referred to as consumptive coagulopathy), whether acute or chronic, and/or vascular thrombosis. In some instances, the dose-limiting toxicity associated with LNPs is acute phase response (APR) or complement activation-related pseudoallergy (CARPA).

[0756] As used herein, coagulopathy refers to increased coagulation (blood clotting) in vivo. The findings reported in this disclosure are consistent with such increased coagulation and significantly provide insight on the underlying mechanism. Coagulation is a process that involves a number of different factors and cell types, and heretofore the relationship between and interaction of LNPs and platelets has not been understood in this regard. This disclosure provides evidence of such interaction and also provides compounds and compositions that are modified to have reduced platelet effect, including reduced platelet association, reduced platelet aggregation, and/or reduced platelet aggregation. The ability to modulate, including preferably down-modulate, such platelet effects can reduce the incidence and/or severity of coagulopathy post-LNP administration. This in turn will reduce toxicity relating to such LNP, thereby allowing higher doses of LNPs and importantly their cargo to be administered to patients in need thereof.

[0757] CARPA is a class of acute immune toxicity manifested in hypersensitivity reactions (HSRs), which may be triggered by nanomedicines and biologicals. Unlike allergic reactions, CARPA typically does not involve IgE but arises as a consequence of activation of the complement system, which is part of the innate immune system that enhances the body's abilities to clear pathogens. One or more of the following pathways, the classical complement pathway (CP), the alternative pathway (AP), and the lectin pathway (LP), may be involved in CARPA. Szebeni, Molecular Immunology, 61:163-173 (2014).

[0758] The classical pathway is triggered by activation of the C1-complex, which contains. C1q, C1r, C1s, or C1qr2s2. Activation of the C1-complex occurs when C1q binds to IgM or IgG complexed with antigens, or when C1q binds directly to the surface of the pathogen. Such binding leads to conformational changes in the C1q molecule, which leads to the activation of C1r, which in turn, cleave C1s. The C1r2s2 component now splits C4 and then C2, producing C4a, C4b, C2a, and C2b. C4b and C2b bind to form the classical pathway C3-convertase (C4b2b complex), which promotes cleavage of C3 into C3a and C3b. C3b then binds the C3 convertase to from the C5 convertase (C4b2b3b complex). The alternative pathway is continuously activated as a result of spontaneous C3 hydrolysis. Factor P (properdin) is a positive regulator of the alternative pathway. Oligomerization of properdin stabilizes the C3 convertase, which can then cleave much more C3. The C3 molecules can bind to surfaces and recruit more B, D, and P activity, leading to amplification of the complement activation.

[0759] Acute phase response (APR) is a complex systemic innate immune responses for preventing infection and clearing potential pathogens. Numerous proteins are involved in APR and C-reactive protein is a well-characterized one.

[0760] It has been found, in accordance with the invention, that certain LNP are able to associate physically with platelets almost immediately after administration in vivo, while other LNP do not associate with platelets at all or only at background levels. Significantly, those LNPs that associate with platelets also apparently stabilize the platelet aggregates that are formed thereafter. Physical contact of the platelets with certain LNPs correlates with the ability of such platelets to remain aggregated or to form aggregates continuously for an extended period of time after administration. Such aggregates comprise activated platelets and also innate immune cells such as macrophages and B cells.

### Methods of Use

[0761] The polynucleotides, pharmaceutical compositions and formulations described herein are used in the preparation, manufacture and therapeutic use of to treat and/or prevent progressive familial intrahepatic cholestasis-related diseases (e.g., PFIC1, PFIC2, PFIC3), disorders or conditions. In some embodiments, the polynucleotides, compositions and formulations of the invention are used to treat and/or prevent PFICs (e.g., PFIC1, PFIC2, PFIC3). Replacement therapy is a potential treatment for PFIC1, PFIC2, and PFIC3. Thus, in certain aspects of the invention, the polynucleotides, e.g., mRNA, disclosed herein, comprise one or more sequences encoding an ABCB4, ABCB11, and/or ATP8B1 that is suitable for use in gene replacement therapy for PFIC. In some embodiments, the present disclosure treats a canalicular transporter defect by providing a polynucleotide, e.g., an mRNA, that encodes an ABCB4, ABCB11, or ATP8B1 polypeptide to the subject.

[0762] In some embodiments, the polynucleotides, pharmaceutical compositions and formulations of the invention are used in methods for increasing the levels of ABCB4, ABCB11, and/or ATP8B1 in a subject in need thereof. For instance, one aspect of the invention provides a method of alleviating the symptoms of PFICs in a subject comprising the administration of a composition or formulation comprising one or more polynucleotide(s) encoding ABCB4, ABCB11, and/or ATP8B1 to that subject (e.g., one or more mRNA(s) encoding an ABCB4 polypeptide, an ABCB11, and/or an ATP8B1 polypeptide(s)). In another instance, one aspect of the invention provides a method of alleviating the symptoms of PFICs in a subject comprising the administration of a composition or formulation comprising a polynucleotide encoding ABCB4, a polynucleotide encoding ABCB11, and/or a polynucleotide encoding ATP8B1 to that subject (e.g., an mRNA encoding an ABCB4 polypeptide, an mRNA encoding an ABCB11 polypeptide, and/or an mRNA encoding an ATP8B1 polypeptide). In another instance, one aspect of the invention provides a method of alleviating the symptoms of PFICs in a subject comprising the co-administration of a composition or formulation comprising a polynucleotide encoding ABCB4, a composition or formulation comprising a polynucleotide encoding ABCB11, and/or a composition or formulation comprising a polynucleotide encoding ATP8B1 to that subject. Another aspect of the invention provides a method of alleviating the symptoms of PFICs in a subject comprising the administration of a composition or formulation comprising a polynucleotide encoding ABCB4 to that subject (e.g., an mRNA encoding an ABCB4 polypeptide). Another aspect of the invention provides a method of alleviating the symptoms of PFICs in a subject comprising the administration of a composition or formulation comprising a polynucleotide encoding ABCB11 to that subject (e.g., an mRNA encoding an ABCB11 polypeptide). Another aspect of the invention provides a method of alleviating the symptoms of PFICs in a subject comprising the administration of a composition or formulation comprising a polynucleotide encoding ATP8B1 to that subject (e.g., an mRNA encoding an ATP8B1 polypeptide).

[0763] As noted above, replacement therapy is a potential treatment for PFICs. Thus, in certain aspects of the invention, the polynucleotides, e.g., mRNA, disclosed herein comprise one or more sequences encoding an ABCB4, ABCB11, and/or ATP8B1 polypeptide that is suitable for use in gene replacement therapy for PFICs. In some embodiments, the present disclosure treats a lack of ABCB4, ABCB11, and/or ATP8B1 in a subject by providing at least one polynucleotide, e.g., mRNA, that encodes an ABCB4 polypeptide, an ABCB11 polypeptide, and/or an ATP8B1 polypeptide to the subject. In some embodiments, the at least one polynucleotide is sequence-optimized. In some embodiments, the at least one polynucleotide (e.g., an mRNA) comprises a nucleic acid sequence (e.g., an ORF) encoding an ABCB4 polypeptide, ABCB11 polypeptide, and/or ATP8B1 polypeptide, wherein the at least one nucleic acid is sequence-optimized, e.g., by modifying its G/C, uridine, or thymidine content, and/or the at least one polynucleotide comprises at least one chemically modified nucleoside. In some embodiments, the at least one polynucleotide comprises a miRNA binding site, e.g., a miRNA binding site that binds miRNA-142 and/or a miRNA binding site that binds miRNA-126.

[0764] In some embodiments, the administration of a composition or formulation comprising at least one polynucleotide, pharmaceutical composition or formulation of the invention to a subject results in a decrease in bile phosphatidylcholine to a level at least 10%, at least 15%, at least 20%, at least 25%, at least 30%, at least 35%, at least 40%, at least 45%, at least 50%, at least 55%, at least 60%, at least 65%, at least 70%, at least 75%, at least 80%, at least 85%, at least 90%, at least 95%, or to 100% or more than the level observed prior to the administration of the composition or formulation.

[0765] In some embodiments, the administration of the at least one polynucleotide, pharmaceutical composition or formulation of the invention results in expression of ABCB4, ABCB11, and/or ATP8B1 in cells of the subject. In some embodiments, administering the at least one polynucleotide, pharmaceutical composition or formulation of the invention results in an increase of ABCB4, ABCB11, and/or ATP8B1 expression in the subject. For example, in some embodiments, the polynucleotides of the present invention are used in methods of administering a composition or formulation comprising at least one mRNA encoding an ABCB4, ABCB11, and/or ATP8B1 polypeptide to a subject, wherein the method results in an increase of ABCB4, ABCB11, and/or ATP8B1 expression in at least some cells of a subject.

[0766] In some embodiments, the administration of a composition or formulation comprising at least one mRNA encoding an ABCB4, ABCB11, and/or ATP8B1 polypeptide to a subject results in an increase of ABCB4, ABCB11, and/or ATP8B1 expression in cells subject to a level at least 10%, at least 15%, at least 20%, at least 25%, at least 30%, at least 35%, at least 40%, at least 45%, at least 50%, at least 55%, at least 60%, at least 65%, at least 70%, at least 75%, at least 80%, at least 85%, at least 90%, at least 95%, or to 100% or more of the expression and/or activity level expected in a normal subject, e.g., a human not suffering from PFIC. In another embodiment, repeat dosing results in sustained ABCB4, ABCB11, and/or ATP8B1 expression.

[0767] In some embodiments, the administration of the at least one polynucleotide, pharmaceutical composition or formulation of the invention results in expression of ABCB4, ABCB11, and/or ATP8B1 protein in at least some of the cells of a subject that persists for a period of time sufficient to allow bile transport to occur.

[0768] In some embodiments, the expression of the encoded polypeptide(s) is increased. In some embodiments, the at least one polynucleotide increases ABCB4, ABCB11, and/or ATP8B1 expression in cells when introduced into those cells, e.g., by at least 2%, by at least 5%, by at least 10%, at least 15%, at least 20%, at least 25%, at least 30%, at least 35%, at least 40%, at least 45%, at least 50%, at least 55%, at least 60%, at least 65%, at least 70%, at least 75%, at least 80%, at least 85%, at least 90%, at least 95%, or to 100% with respect to the ABCB4, ABCB11, and/or ATP8B1 expression in the cells before the at least one polypeptide is introduced in the cells.

[0769] In some embodiments, the method or use comprises administering at least one polynucleotide, e.g., mRNA, comprising at least one nucleotide sequence having sequence similarity to a polynucleotide selected from the group of SEQ ID NO: 68-118, 120, 122, 124, 126, 128, 130, 132, 134, 136, 138, 140, and 142, wherein the at least one polynucleotide encodes an ABCB4, ABCB11, and/or ATP8B1 polypeptide(s).

[0770] Other aspects of the present disclosure relate to transplantation of cells containing polynucleotides to a mammalian subject. Administration of cells to mammalian subjects is known to those of ordinary skill in the art, and includes, but is not limited to, local implantation (e.g., topical or subcutaneous administration), organ delivery or systemic injection (e.g., intravenous injection or inhalation), and the formulation of cells in pharmaceutically acceptable carriers.

[0771] In some embodiments, the polynucleotides (e.g., mRNA), pharmaceutical compositions and formulations used in the methods of the invention comprise a uracil-modified sequence encoding an ABCB4, ABCB11, and/or ATP8B1 polypeptide disclosed herein and a miRNA binding site disclosed herein, e.g., a miRNA binding site that binds to miR-142 and/or a miRNA binding site that binds to miR-126. In some embodiments, the uracil-modified sequence encoding an ABCB4, ABCB11, and/or ATP8B1 polypeptide comprises at least one chemically modified nucleobase, e.g., N1-methylpseudouracil or 5-methoxyuracil. In some embodiments, at least 95% of a type of nucleobase (e.g., uracil) in a uracil-modified sequence encoding an ABCB4, ABCB11, and/or ATP8B1 polypeptide of the invention are modified nucleobases. In some embodiments, at least 95% of uracil in a uracil-modified sequence encoding an ABCB4, ABCB11, and/or ATP8B1 polypeptide is 1-N-methylpseudouridine or 5-methoxyuridine. In some embodiments, the polynucleotide (e.g., a RNA, e.g., a mRNA) disclosed herein is formulated with a delivery agent comprising, e.g., a compound having the Formula (I), e.g., any of Compounds 1-232, e.g., Compound II; a compound having the Formula (III), (IV), (V), or (VI), e.g., any of Compounds 233-342, e.g., Compound VI; or a compound having the Formula (VIII), e.g., any of Compounds 419-428, e.g., Compound I, or any combination thereof In some embodiments, the delivery agent comprises Compound II, DSPC, Cholesterol, and Compound I or PEG-DMG, e.g., with a mole ratio of about 47.5:10.5:39.0:3.0 or about 50:10:38.5:1.5. In some embodiments, the delivery agent comprises Compound VI, DSPC, Cholesterol, and Compound I or PEG-DMG, e.g., with a mole ratio in the range of about 30 to about 60 mol % Compound II or VI (or related suitable amino lipid) (e.g., 30-40, 40-45, 45-50, 50-55 or 55-60 mol % Compound II or VI (or related suitable amino lipid)), about 5 to about 20 mol % phospholipid (or related suitable phospholipid or “helper lipid”) (e.g., 5-10, 10-15, or 15-20 mol % phospholipid (or related suitable phospholipid or “helper lipid”)), about 20 to about 50 mol % cholesterol (or related sterol or “non-cationic” lipid) (e.g., about 20-30, 30-35, 35-40, 40-45, or 45-50 mol % cholesterol (or related sterol or “non-cationic” lipid)) and about 0.05 to about 10 mol % PEG lipid (or other suitable PEG lipid) (e.g., 0.05-1, 1-2, 2-3, 3-4, 4-5, 5-7, or 7-10 mol % PEG lipid (or other suitable PEG lipid)). An exemplary delivery agent can comprise mole ratios of, for example, 47.5:10.5:39.0:3.0 or 50:10:38.5:1.5. In certain instances, an exemplary delivery agent can comprise mole ratios of, for example, 47.5:10.5:39.0:3; 47.5:10:39.5:3; 47.5:11:39.5:2; 47.5:10.5:39.5:2.5; 47.5:11:39:2.5; 48.5:10:38.5:3; 48.5:10.5:39:2; 48.5:10.5:38.5:2.5; 48.5:10.5:39.5:1.5; 48.5:10.5:38.0:3; 47:10.5:39.5:3; 47:10:40.5:2.5; 47:11:40:2; 47:10.5:39.5:3; 48:10.5:38.5:3; 48:10:39.5:2.5; 48:11:39:2; or 48:10.5:38.5:3. In some embodiments, the delivery agent comprises Compound II or VI, DSPC, Cholesterol, and Compound I or PEG-DMG, e.g., with a mole ratio of about 47.5:10.5:39.0:3.0. In some embodiments, the delivery agent comprises Compound II or VI, DSPC, Cholesterol, and Compound I or PEG-DMG, e.g., with a mole ratio of about 47.5:10.5:39.0:3.0 or about 50:10:38.5:1.5.

[0772] The skilled artisan will appreciate that the therapeutic effectiveness of a drug or a treatment of the instant invention can be characterized or determined by measuring the level of expression of an encoded protein (e.g., enzyme) in a sample or in samples taken from a subject (e.g., from a preclinical test subject (rodent, primate, etc.) or from a clinical subject (human). Likewise, the therapeutic effectiveness of a drug or a treatment of the instant invention can be characterized or determined by measuring the level of activity of an encoded protein (e.g., enzyme) in a sample or in samples taken from a subject (e.g., from a preclinical test subject (rodent, primate, etc.) or from a clinical subject (human). Furthermore, the therapeutic effectiveness of a drug or a treatment of the instant invention can be characterized or determined by measuring the level of an appropriate biomarker in sample(s) taken from a subject. Levels of protein and/or biomarkers can be determined post-administration with a single dose of an mRNA therapeutic of the invention or can be determined and/or monitored at several time points following administration with a single dose or can be determined and/or monitored throughout a course of treatment, e.g., a multi-dose treatment.

### ABCB4, ABCB11, or ATP8B1 Protein Expression Levels

[0773] Certain aspects of the invention feature measurement, determination and/or monitoring of the expression level or levels of ABCB4, ABCB11, and/or ATP8B1 in a subject, for example, in an animal (e.g., rodents, primates, and the like) or in a human subject. Animals include normal, healthy or wildtype animals, as well as animal models for use in understanding PFIC and treatments thereof. Exemplary animal models include rodent models, for example, PFIC deficient mice also referred to as PFIC mice.

[0774] ABCB4, ABCB11, or ATP8B1 protein expression levels can be measured or determined by any art-recognized method for determining protein levels in biological samples, e.g., from blood samples or a needle biopsy. The term “level” or “level of a protein” as used herein, preferably means the weight, mass or concentration of the protein within a sample or a subject. It will be understood by the skilled artisan that in certain embodiments the sample may be subjected, e.g., to any of the following: purification, precipitation, separation, e.g. centrifugation and/or HPLC, and subsequently subjected to determining the level of the protein, e.g., using mass and/or spectrometric analysis. In exemplary embodiments, enzyme-linked immunosorbent assay (ELISA) can be used to determine protein expression levels. In other exemplary embodiments, protein purification, separation and LC-MS can be used as a means for determining the level of a protein according to the invention. In some embodiments, an mRNA therapy of the invention (e.g., a single intravenous dose) results in increased ABCB4, ABCB11, and/or ATP8B1 protein expression levels in the liver tissue of the subject (e.g., 2-fold, 3-fold, 4-fold, 5-fold, 6-fold, 7-fold, 8-fold, 9-fold, 10-fold, 20-fold, 30-fold, 40-fold, 50-fold increase and/or increased to at least 50%, at least 60%, at least 70%, at least 75%, 80%, at least 85%, at least 90%, at least 95%, or at least 100% of normal levels) for at least 6 hours, at least 12 hours, at least 24 hours, at least 36 hours, at least 48 hours, at least 60 hours, at least 72 hours, at least 84 hours, at least 96 hours, at least 108 hours, at least 122 hours after administration of a single dose of the mRNA therapy. In some embodiments, an mRNA therapy of the invention (e.g., a single intravenous dose) results in increased ABCB4, ABCB11, and/or ATP8B1 expression levels in the plasma and/or increased ABCB4, ABCB11, and/or ATP8B1 expression levels in the urine of the subject (e.g., less than 100, 125, 150, 175, 200, 225, 250, 275, 300, 325, 350, 375, 400, 425, 450, 475, 500, 525, 550, 575, 600, 625, 650, 675, 700, 725, 750, 775, 800, 825, 850, 875, 900, 925, 950, 975, 1000, 1025, 1050, 1075, 1100, 1125, 1150, 1175 or 1,200 μM) for at least 6 hours, at least 12 hours, at least 24 hours, at least 36 hours, at least 48 hours, at least 60 hours, at least 72 hours, at least 84 hours, at least 96 hours, at least 108 hours, at least 122 hours after administration of a single dose of the mRNA therapy.

### Compositions and Formulations for Use

[0775] Certain aspects of the invention are directed to compositions or formulations comprising any of the polynucleotides disclosed above.

[0776] In some embodiments, the composition or formulation comprises: a polynucleotide (e.g., a RNA, e.g., an mRNA) comprising a sequence-optimized nucleotide sequence (e.g., an ORF) encoding a ABCB4 polypeptide, a polynucleotide (e.g., a RNA, e.g., an mRNA) comprising a sequence-optimized nucleotide sequence (e.g., an ORF) encoding a ABCB11 polypeptide, and/or a polynucleotide (e.g., a RNA, e.g., an mRNA) comprising a sequence-optimized nucleotide sequence (e.g., an ORF) encoding a ATP8B1 polypeptide (e.g., the wild-type sequence, functional fragment, or variant thereof), wherein the polynucleotide(s) comprises at least one chemically modified nucleobase, e.g., N1-methylpseudouracil or 5-methoxyuracil (e.g., wherein at least about 25%, at least about 30%, at least about 40%, at least about 50%, at least about 60%, at least about 70%, at least about 80%, at least about 90%, at least about 95%, at least about 99%, or 100% of the uracils are N1-methylpseudouracils or 5-methoxyuracils), and wherein the polynucleotide(s) further comprises a miRNA binding site, e.g., a miRNA binding site that binds to miR-142 (e.g., a miR-142-3p or miR-142-5p binding site) and/or a miRNA binding site that binds to miR-126 (e.g., a miR-126-3p or miR-126-5p binding site); and a delivery agent comprising, e.g., a compound having the Formula (I), e.g., any of Compounds 1-232, e.g., Compound II; a compound having the Formula (III), (IV), (V), or (VI), e.g., any of Compounds 233-342, e.g., Compound VI; or a compound having the Formula (VIII), e.g., any of Compounds 419-428, e.g., Compound I, or any combination thereof In some embodiments, the delivery agent is a lipid nanoparticle comprising Compound II, Compound VI, a salt or a stereoisomer thereof, or any combination thereof. In some embodiments, the delivery agent comprises Compound II, DSPC, Cholesterol, and Compound I or PEG-DMG, e.g., with a mole ratio of about 50:10:38.5:1.5. In some embodiments, the delivery agent comprises Compound II, DSPC, Cholesterol, and Compound I or PEG-DMG, e.g., with a mole ratio of about 47.5:10.5:39.0:3.0. In some embodiments, the delivery agent comprises Compound VI, DSPC, Cholesterol, and Compound I or PEG-DMG, e.g., with a mole ratio of about 50:10:38.5:1.5. In some embodiments, the delivery agent comprises Compound VI, DSPC, Cholesterol, and Compound I or PEG-DMG, e.g., with a mole ratio of about 47.5:10.5:39.0:3.0.

[0777] In some embodiments, the uracil or thymine content of the ORF relative to the theoretical minimum uracil or thymine content of a nucleotide sequence encoding the ABCB4, ABCB11, or ATP8B1 polypeptide (%U_{TM} or %T_{TM}), is between about 100% and about 150%.

[0778] In some embodiments, the polynucleotides, compositions or formulations above are used to treat and/or prevent ABCB4, ABCB11, or ATP8B1-related diseases, disorders or conditions, e.g., PFICs.

### Forms of Administration

[0779] The polynucleotides, pharmaceutical compositions and formulations of the invention described above can be administered by any route that results in a therapeutically effective outcome. These include, but are not limited to enteral (into the intestine), gastroenteral, epidural (into the dura matter), oral (by way of the mouth), transdermal, peridural, intracerebral (into the cerebrum), intracerebroventricular (into the cerebral ventricles), epicutaneous (application onto the skin), intradermal, (into the skin itself), subcutaneous (under the skin), nasal administration (through the nose), intravenous (into a vein), intravenous bolus, intravenous drip, intraarterial (into an artery), intramuscular (into a muscle), intracardiac (into the heart), intraosseous infusion (into the bone marrow), intrathecal (into the spinal canal), intraperitoneal, (infusion or injection into the peritoneum), intravesical infusion, intravitreal, (through the eye), intracavernous injection (into a pathologic cavity) intracavitary (into the base of the penis), intravaginal administration, intrauterine, extra-amniotic administration, transdermal (diffusion through the intact skin for systemic distribution), transmucosal (diffusion through a mucous membrane), transvaginal, insufflation (snorting), sublingual, sublabial, enema, eye drops (onto the conjunctiva), in ear drops, auricular (in or by way of the ear), buccal (directed toward the cheek), conjunctival, cutaneous, dental (to a tooth or teeth), electro-osmosis, endocervical, endosinusial, endotracheal, extracorporeal, hemodialysis, infiltration, interstitial, intra-abdominal, intra-amniotic, intra-articular, intrabiliary, intrabronchial, intrabursal, intracartilaginous (within a cartilage), intracaudal (within the cauda equine), intracisternal (within the cisterna magna cerebellomedularis), intracorneal (within the cornea), dental intracornal, intracoronary (within the coronary arteries), intracorporus cavernosum (within the dilatable spaces of the corporus cavernosa of the penis), intradiscal (within a disc), intraductal (within a duct of a gland), intraduodenal (within the duodenum), intradural (within or beneath the dura), intraepidermal (to the epidermis), intraesophageal (to the esophagus), intragastric (within the stomach), intragingival (within the gingivae), intraileal (within the distal portion of the small intestine), intralesional (within or introduced directly to a localized lesion), intraluminal (within a lumen of a tube), intralymphatic (within the lymph), intramedullary (within the marrow cavity of a bone), intrameningeal (within the meninges), intraocular (within the eye), intraovarian (within the ovary), intrapericardial (within the pericardium), intrapleural (within the pleura), intraprostatic (within the prostate gland), intrapulmonary (within the lungs or its bronchi), intrasinal (within the nasal or periorbital sinuses), intraspinal (within the vertebral column), intrasynovial (within the synovial cavity of a joint), intratendinous (within a tendon), intratesticular (within the testicle), intrathecal (within the cerebrospinal fluid at any level of the cerebrospinal axis), intrathoracic (within the thorax), intratubular (within the tubules of an organ), intratympanic (within the aurus media), intravascular (within a vessel or vessels), intraventricular (within a ventricle), iontophoresis (by means of electric current where ions of soluble salts migrate into the tissues of the body), irrigation (to bathe or flush open wounds or body cavities), laryngeal (directly upon the larynx), nasogastric (through the nose and into the stomach), occlusive dressing technique (topical route administration that is then covered by a dressing that occludes the area), ophthalmic (to the external eye), oropharyngeal (directly to the mouth and pharynx), parenteral, percutaneous, periarticular, peridural, perineural, periodontal, rectal, respiratory (within the respiratory tract by inhaling orally or nasally for local or systemic effect), retrobulbar (behind the pons or behind the eyeball), intramyocardial (entering the myocardium), soft tissue, subarachnoid, subconjunctival, submucosal, topical, transplacental (through or across the placenta), transtracheal (through the wall of the trachea), transtympanic (across or through the tympanic cavity), ureteral (to the ureter), urethral (to the urethra), vaginal, caudal block, diagnostic, nerve block, biliary perfusion, cardiac perfusion, photopheresis or spinal. In specific embodiments, compositions can be administered in a way that allows them cross the blood-brain barrier, vascular barrier, or other epithelial barrier. In some embodiments, a formulation for a route of administration can include at least one inactive ingredient.

[0780] The polynucleotides of the present invention (e.g., a polynucleotide comprising a nucleotide sequence encoding an ABCB4, ABCB11, or ATP8B1 polypeptide or a functional fragment or variant thereof) can be delivered to a cell naked. As used herein in, “naked” refers to delivering polynucleotides free from agents that promote transfection. The naked polynucleotides can be delivered to the cell using routes of administration known in the art and described herein.

[0781] The polynucleotides of the present invention (e.g., a polynucleotide comprising a nucleotide sequence encoding an ABCB4, ABCB11, or ATP8B1 polypeptide or a functional fragment or variant thereof) can be formulated, using the methods described herein. The formulations can contain polynucleotides that can be modified and/or unmodified. The formulations can further include, but are not limited to, cell penetration agents, a pharmaceutically acceptable carrier, a delivery agent, a bioerodible or biocompatible polymer, a solvent, and a sustained-release delivery depot. The formulated polynucleotides can be delivered to the cell using routes of administration known in the art and described herein.

[0782] A pharmaceutical composition for parenteral administration can comprise at least one inactive ingredient. Any or none of the inactive ingredients used can have been approved by the US Food and Drug Administration (FDA). A non-exhaustive list of inactive ingredients for use in pharmaceutical compositions for parenteral administration includes hydrochloric acid, mannitol, nitrogen, sodium acetate, sodium chloride and sodium hydroxide.

[0783] Injectable preparations, for example, sterile injectable aqueous or oleaginous suspensions can be formulated according to the known art using suitable dispersing agents, wetting agents, and/or suspending agents. Sterile injectable preparations can be sterile injectable solutions, suspensions, and/or emulsions in nontoxic parenterally acceptable diluents and/or solvents, for example, as a solution in 1,3-butanediol. Among the acceptable vehicles and solvents that can be employed are water, Ringer's solution, U.S.P., and isotonic sodium chloride solution. Sterile, fixed oils are conventionally employed as a solvent or suspending medium. For this purpose, any bland fixed oil can be employed including synthetic mono- or diglycerides. Fatty acids such as oleic acid can be used in the preparation of injectables. The sterile formulation can also comprise adjuvants such as local anesthetics, preservatives and buffering agents.

[0784] Injectable formulations can be sterilized, for example, by filtration through a bacterial-retaining filter, and/or by incorporating sterilizing agents in the form of sterile solid compositions that can be dissolved or dispersed in sterile water or other sterile injectable medium prior to use.

[0785] Injectable formulations can be for direct injection into a region of a tissue, organ and/or subject. As a non-limiting example, a tissue, organ and/or subject can be directly injected a formulation by intramyocardial injection into the ischemic region. (See, e.g., Zangi et al. Nature Biotechnology 2013; the contents of which are herein incorporated by reference in its entirety).

[0786] In order to prolong the effect of an active ingredient, it is often desirable to slow the absorption of the active ingredient from subcutaneous or intramuscular injection. This can be accomplished by the use of a liquid suspension of crystalline or amorphous material with poor water solubility. The rate of absorption of the drug then depends upon its rate of dissolution which, in turn, can depend upon crystal size and crystalline form. Alternatively, delayed absorption of a parenterally administered drug form is accomplished by dissolving or suspending the drug in an oil vehicle. Injectable depot forms are made by forming microencapsule matrices of the drug in biodegradable polymers such as polylactide-polyglycolide. Depending upon the ratio of drug to polymer and the nature of the particular polymer employed, the rate of drug release can be controlled. Examples of other biodegradable polymers include poly(orthoesters) and poly(anhydrides). Depot injectable formulations are prepared by entrapping the drug in liposomes or microemulsions that are compatible with body tissues.

### Kits and Devices

### Kits

[0787] The invention provides a variety of kits for conveniently and/or effectively using the claimed nucleotides of the present invention. Typically, kits will comprise sufficient amounts and/or numbers of components to allow a user to perform multiple treatments of a subject(s) and/or to perform multiple experiments. (

[0788] In one aspect, the present invention provides kits comprising the molecules (polynucleotides) of the invention.

[0789] Said kits can be for protein production, comprising a first polynucleotides comprising a translatable region. The kit can further comprise packaging and instructions and/or a delivery agent to form a formulation composition. The delivery agent can comprise a saline, a buffered solution, a lipidoid or any delivery agent disclosed herein.

[0790] In some embodiments, the buffer solution can include sodium chloride, calcium chloride, phosphate and/or EDTA. In another embodiment, the buffer solution can include, but is not limited to, saline, saline with 2 mM calcium, 5% sucrose, 5% sucrose with 2 mM calcium, 5% Mannitol, 5% Mannitol with 2 mM calcium, Ringer's lactate, sodium chloride, sodium chloride with 2 mM calcium and mannose (See, e.g., U.S. Pub. No. 20120258046; herein incorporated by reference in its entirety). In a further embodiment, the buffer solutions can be precipitated or it can be lyophilized. The amount of each component can be varied to enable consistent, reproducible higher concentration saline or simple buffer formulations. The components can also be varied in order to increase the stability of modified RNA in the buffer solution over a period of time and/or under a variety of conditions. In one aspect, the present invention provides kits for protein production, comprising: a polynucleotide comprising a translatable region, provided in an amount effective to produce a desired amount of a protein encoded by the translatable region when introduced into a target cell; a second polynucleotide comprising an inhibitory nucleic acid, provided in an amount effective to substantially inhibit the innate immune response of the cell; and packaging and instructions.

[0791] In one aspect, the present invention provides kits for protein production, comprising a polynucleotide comprising a translatable region, wherein the polynucleotide exhibits reduced degradation by a cellular nuclease, and packaging and instructions.

[0792] In one aspect, the present invention provides kits for protein production, comprising a polynucleotide comprising a translatable region, wherein the polynucleotide exhibits reduced degradation by a cellular nuclease, and a mammalian cell suitable for translation of the translatable region of the first nucleic acid.

### Devices

[0793] The present invention provides for devices that can incorporate polynucleotides that encode polypeptides of interest. These devices contain in a stable formulation the reagents to synthesize a polynucleotide in a formulation available to be immediately delivered to a subject in need thereof, such as a human patient.

[0794] Devices for administration can be employed to deliver the polynucleotides of the present invention according to single, multi- or split-dosing regimens taught herein. Such devices are taught in, for example, International Application Publ. No. WO2013151666, the contents of which are incorporated herein by reference in their entirety.

[0795] Method and devices known in the art for multi-administration to cells, organs and tissues are contemplated for use in conjunction with the methods and compositions disclosed herein as embodiments of the present invention. These include, for example, those methods and devices having multiple needles, hybrid devices employing for example lumens or catheters as well as devices utilizing heat, electric current or radiation driven mechanisms.

[0796] According to the present invention, these multi-administration devices can be utilized to deliver the single, multi- or split doses contemplated herein. Such devices are taught for example in, International Application Publ. No. WO2013151666, the contents of which are incorporated herein by reference in their entirety.

[0797] In some embodiments, the polynucleotide is administered subcutaneously or intramuscularly via at least 3 needles to three different, optionally adjacent, sites simultaneously, or within a 60 minutes period (e.g., administration to 4, 5, 6, 7, 8, 9, or 10 sites simultaneously or within a 60 minute period).

Methods and Devices Utilizing Catheters and/or Lumens

[0798] Methods and devices using catheters and lumens can be employed to administer the polynucleotides of the present invention on a single, multi- or split dosing schedule. Such methods and devices are described in International Application Publication No. WO2013151666, the contents of which are incorporated herein by reference in their entirety.

### Methods and Devices Utilizing Electrical Current

[0799] Methods and devices utilizing electric current can be employed to deliver the polynucleotides of the present invention according to the single, multi- or split dosing regimens taught herein. Such methods and devices are described in International Application Publication No. WO2013151666, the contents of which are incorporated herein by reference in their entirety.

### Definitions

[0800] In order that the present disclosure can be more readily understood, certain terms are first defined. As used in this application, except as otherwise expressly provided herein, each of the following terms shall have the meaning set forth below. Additional definitions are set forth throughout the application.

[0801] The invention includes embodiments in which exactly one member of the group is present in, employed in, or otherwise relevant to a given product or process. The invention includes embodiments in which more than one, or all of the group members are present in, employed in, or otherwise relevant to a given product or process.

[0802] In this specification and the appended claims, the singular forms “a”, “an” and “the” include plural referents unless the context clearly dictates otherwise. The terms “a” (or “an”), as well as the terms “one or more,” and “at least one” can be used interchangeably herein. In certain aspects, the term “a” or “an” means “single.” In other aspects, the term “a” or “an” includes “two or more” or “multiple.”

[0803] Furthermore, “and/or” where used herein is to be taken as specific disclosure of each of the two specified features or components with or without the other. Thus, the term “and/or” as used in a phrase such as “A and/or B” herein is intended to include “A and B,” “A or B,” “A” (alone), and “B” (alone). Likewise, the term “and/or” as used in a phrase such as “A, B, and/or C” is intended to encompass each of the following aspects: A, B, and C; A, B, or C; A or C; A or B; B or C; A and C; A and B; B and C; A (alone); B (alone); and C (alone).

[0804] Unless defined otherwise, all technical and scientific terms used herein have the same meaning as commonly understood by one of ordinary skill in the art to which this disclosure is related. For example, the Concise Dictionary of Biomedicine and Molecular Biology, Juo, Pei-Show, 2nd ed., 2002, CRC Press; The Dictionary of Cell and Molecular Biology, 3rd ed., 1999, Academic Press; and the Oxford Dictionary Of Biochemistry And Molecular Biology, Revised, 2000, Oxford University Press, provide one of skill with a general dictionary of many of the terms used in this disclosure.

[0805] Wherever aspects are described herein with the language “comprising,” otherwise analogous aspects described in terms of “consisting of” and/or “consisting essentially of” are also provided.

[0806] Units, prefixes, and symbols are denoted in their Systeme International de Unites (SI) accepted form. Numeric ranges are inclusive of the numbers defining the range. Where a range of values is recited, it is to be understood that each intervening integer value, and each fraction thereof, between the recited upper and lower limits of that range is also specifically disclosed, along with each subrange between such values. The upper and lower limits of any range can independently be included in or excluded from the range, and each range where either, neither or both limits are included is also encompassed within the invention. Where a value is explicitly recited, it is to be understood that values which are about the same quantity or amount as the recited value are also within the scope of the invention. Where a combination is disclosed, each subcombination of the elements of that combination is also specifically disclosed and is within the scope of the invention. Conversely, where different elements or groups of elements are individually disclosed, combinations thereof are also disclosed. Where any element of an invention is disclosed as having a plurality of alternatives, examples of that invention in which each alternative is excluded singly or in any combination with the other alternatives are also hereby disclosed; more than one element of an invention can have such exclusions, and all combinations of elements having such exclusions are hereby disclosed.

[0807] Nucleotides are referred to by their commonly accepted single-letter codes. Unless otherwise indicated, nucleic acids are written left to right in 5′ to 3′ orientation. Nucleobases are referred to herein by their commonly known one-letter symbols recommended by the IUPAC-IUB Biochemical Nomenclature Commission. Accordingly, A represents adenine, C represents cytosine, G represents guanine, T represents thymine, U represents uracil.

[0808] Amino acids are referred to herein by either their commonly known three letter symbols or by the one-letter symbols recommended by the IUPAC-IUB Biochemical Nomenclature Commission. Unless otherwise indicated, amino acid sequences are written left to right in amino to carboxy orientation.

[0809] About: The term “about” as used in connection with a numerical value throughout the specification and the claims denotes an interval of accuracy, familiar and acceptable to a person skilled in the art, such interval of accuracy is ±10%.

[0810] Where ranges are given, endpoints are included. Furthermore, unless otherwise indicated or otherwise evident from the context and understanding of one of ordinary skill in the art, values that are expressed as ranges can assume any specific value or subrange within the stated ranges in different embodiments of the invention, to the tenth of the unit of the lower limit of the range, unless the context clearly dictates otherwise.

[0811] Administered in combination: As used herein, the term “administered in combination” or “combined administration” means that two or more agents are administered to a subject at the same time or within an interval such that there can be an overlap of an effect of each agent on the patient. In some embodiments, they are administered within about 60, 30, 15, 10, 5, or 1 minute of one another. In some embodiments, the administrations of the agents are spaced sufficiently closely together such that a combinatorial (e.g., a synergistic) effect is achieved.

[0812] Amino acid substitution: The term “amino acid substitution” refers to replacing an amino acid residue present in a parent or reference sequence (e.g., a wild type ABCB4, ABCB11, or ATP8B1 sequence) with another amino acid residue. An amino acid can be substituted in a parent or reference sequence (e.g., a wild type ABCB4, ABCB11, or ATP8B1 polypeptide sequence), for example, via chemical peptide synthesis or through recombinant methods known in the art. Accordingly, a reference to a “substitution at position X” refers to the substitution of an amino acid present at position X with an alternative amino acid residue. In some aspects, substitution patterns can be described according to the schema AnY, wherein A is the single letter code corresponding to the amino acid naturally or originally present at position n, and Y is the substituting amino acid residue. In other aspects, substitution patterns can be described according to the schema An(YZ), wherein A is the single letter code corresponding to the amino acid residue substituting the amino acid naturally or originally present at position X, and Y and Z are alternative substituting amino acid residue.

[0813] In the context of the present disclosure, substitutions (even when they referred to as amino acid substitution) are conducted at the nucleic acid level, i.e., substituting an amino acid residue with an alternative amino acid residue is conducted by substituting the codon encoding the first amino acid with a codon encoding the second amino acid.

[0814] Animal: As used herein, the term “animal” refers to any member of the animal kingdom. In some embodiments, “animal” refers to humans at any stage of development. In some embodiments, “animal” refers to non-human animals at any stage of development. In certain embodiments, the non-human animal is a mammal (e.g., a rodent, a mouse, a rat, a rabbit, a monkey, a dog, a cat, a sheep, cattle, a primate, or a pig). In some embodiments, animals include, but are not limited to, mammals, birds, reptiles, amphibians, fish, and worms. In some embodiments, the animal is a transgenic animal, genetically-engineered animal, or a clone.

[0815] Approximately: As used herein, the term “approximately,” as applied to one or more values of interest, refers to a value that is similar to a stated reference value. In certain embodiments, the term “approximately” refers to a range of values that fall within 25%, 20%, 19%, 18%, 17%, 16%, 15%, 14%, 13%, 12%, 11%, 10%, 9%, 8%, 7%, 6%, 5%, 4%, 3%, 2%, 1%, or less in either direction (greater than or less than) of the stated reference value unless otherwise stated or otherwise evident from the context (except where such number would exceed 100% of a possible value).

[0816] Associated with: As used herein with respect to a disease, the term “associated with” means that the symptom, measurement, characteristic, or status in question is linked to the diagnosis, development, presence, or progression of that disease. As association can, but need not, be causatively linked to the disease. For example, symptoms, sequelae, or any effects causing a decrease in the quality of life of a patient of PFIC are considered associated with PFIC and in some embodiments of the present invention can be treated, ameliorated, or prevented by administering the polynucleotides of the present invention to a subject in need thereof.

[0817] When used with respect to two or more moieties, the terms “associated with,” “conjugated,” “linked,” “attached,” and “tethered,” when used with respect to two or more moieties, means that the moieties are physically associated or connected with one another, either directly or via one or more additional moieties that serves as a linking agent, to form a structure that is sufficiently stable so that the moieties remain physically associated under the conditions in which the structure is used, e.g., physiological conditions. An “association” need not be strictly through direct covalent chemical bonding. It can also suggest ionic or hydrogen bonding or a hybridization based connectivity sufficiently stable such that the “associated” entities remain physically associated.

[0818] Bifunctional: As used herein, the term “bifunctional” refers to any substance, molecule or moiety that is capable of or maintains at least two functions. The functions can affect the same outcome or a different outcome. The structure that produces the function can be the same or different. For example, bifunctional modified RNAs of the present invention can encode an ABCB4, ABCB11, or ATP8B1 peptide (a first function) while those nucleosides that comprise the encoding RNA are, in and of themselves, capable of extending the half-life of the RNA (second function). In this example, delivery of the bifunctional modified RNA to a subject suffering from a protein deficiency would produce not only a peptide or protein molecule that can ameliorate or treat a disease or conditions, but would also maintain a population modified RNA present in the subject for a prolonged period of time. In other aspects, a bifunctional modified mRNA can be a chimeric or quimeric molecule comprising, for example, an RNA encoding an ABCB4, ABCB11, or ATP8B1 peptide (a first function) and a second protein either fused to first protein or co-expressed with the first protein.

[0819] Biocompatible: As used herein, the term “biocompatible” means compatible with living cells, tissues, organs or systems posing little to no risk of injury, toxicity or rejection by the immune system.

[0820] Biodegradable: As used herein, the term “biodegradable” means capable of being broken down into innocuous products by the action of living things.

[0821] Biologically active: As used herein, the phrase “biologically active” refers to a characteristic of any substance that has activity in a biological system and/or organism. For instance, a substance that, when administered to an organism, has a biological effect on that organism, is considered to be biologically active. In particular embodiments, a polynucleotide of the present invention can be considered biologically active if even a portion of the polynucleotide is biologically active or mimics an activity considered biologically relevant.

[0822] Chimera: As used herein, “chimera” is an entity having two or more incongruous or heterogeneous parts or regions. For example, a chimeric molecule can comprise a first part comprising an ABCB4, ABCB11, or ATP8B1 polypeptide, and a second part (e.g., genetically fused to the first part) comprising a second therapeutic protein (e.g., a protein with a distinct enzymatic activity, an antigen binding moiety, or a moiety capable of extending the plasma half life of ABCB4, ABCB11, or ATP8B1, for example, an Fc region of an antibody).

[0823] Sequence Optimization: The term “sequence optimization” refers to a process or series of processes by which nucleobases in a reference nucleic acid sequence are replaced with alternative nucleobases, resulting in a nucleic acid sequence with improved properties, e.g., improved protein expression or decreased immunogenicity.

[0824] In general, the goal in sequence optimization is to produce a synonymous nucleotide sequence than encodes the same polypeptide sequence encoded by the reference nucleotide sequence. Thus, there are no amino acid substitutions (as a result of codon optimization) in the polypeptide encoded by the codon optimized nucleotide sequence with respect to the polypeptide encoded by the reference nucleotide sequence.

[0825] Codon substitution: The terms “codon substitution” or “codon replacement” in the context of sequence optimization refer to replacing a codon present in a reference nucleic acid sequence with another codon. A codon can be substituted in a reference nucleic acid sequence, for example, via chemical peptide synthesis or through recombinant methods known in the art. Accordingly, references to a “substitution” or “replacement” at a certain location in a nucleic acid sequence (e.g., an mRNA) or within a certain region or subsequence of a nucleic acid sequence (e.g., an mRNA) refer to the substitution of a codon at such location or region with an alternative codon.

[0826] As used herein, the terms “coding region” and “region encoding” and grammatical variants thereof, refer to an Open Reading Frame (ORF) in a polynucleotide that upon expression yields a polypeptide or protein.

[0827] Compound: As used herein, the term “compound,” is meant to include all stereoisomers and isotopes of the structure depicted. As used herein, the term “stereoisomer” means any geometric isomer (e.g., cis- and trans-isomer), enantiomer, or diastereomer of a compound. The present disclosure encompasses any and all stereoisomers of the compounds described herein, including stereomerically pure forms (e.g., geometrically pure, enantiomerically pure, or diastereomerically pure) and enantiomeric and stereoisomeric mixtures, e.g., racemates. Enantiomeric and stereomeric mixtures of compounds and means of resolving them into their component enantiomers or stereoisomers are well-known. “Isotopes” refers to atoms having the same atomic number but different mass numbers resulting from a different number of neutrons in the nuclei. For example, isotopes of hydrogen include tritium and deuterium. Further, a compound, salt, or complex of the present disclosure can be prepared in combination with solvent or water molecules to form solvates and hydrates by routine methods.

[0828] Contacting: As used herein, the term “contacting” means establishing a physical connection between two or more entities. For example, contacting a mammalian cell with a nanoparticle composition means that the mammalian cell and a nanoparticle are made to share a physical connection. Methods of contacting cells with external entities both in vivo and ex vivo are well known in the biological arts. For example, contacting a nanoparticle composition and a mammalian cell disposed within a mammal can be performed by varied routes of administration (e.g., intravenous, intramuscular, intradermal, and subcutaneous) and can involve varied amounts of nanoparticle compositions. Moreover, more than one mammalian cell can be contacted by a nanoparticle composition.

[0829] Conservative amino acid substitution: A “conservative amino acid substitution” is one in which the amino acid residue in a protein sequence is replaced with an amino acid residue having a similar side chain. Families of amino acid residues having similar side chains have been defined in the art, including basic side chains (e.g., lysine, arginine, or histidine), acidic side chains (e.g., aspartic acid or glutamic acid), uncharged polar side chains (e.g., glycine, asparagine, glutamine, serine, threonine, tyrosine, or cysteine), nonpolar side chains (e.g., alanine, valine, leucine, isoleucine, proline, phenylalanine, methionine, or tryptophan), beta-branched side chains (e.g., threonine, valine, isoleucine) and aromatic side chains (e.g., tyrosine, phenylalanine, tryptophan, or histidine). Thus, if an amino acid in a polypeptide is replaced with another amino acid from the same side chain family, the amino acid substitution is considered to be conservative. In another aspect, a string of amino acids can be conservatively replaced with a structurally similar string that differs in order and/or composition of side chain family members.

[0830] Non-conservative amino acid substitution: Non-conservative amino acid substitutions include those in which (i) a residue having an electropositive side chain (e.g., Arg, His or Lys) is substituted for, or by, an electronegative residue (e.g., Glu or Asp), (ii) a hydrophilic residue (e.g., Ser or Thr) is substituted for, or by, a hydrophobic residue (e.g., Ala, Leu, Ile, Phe or Val), (iii) a cysteine or proline is substituted for, or by, any other residue, or (iv) a residue having a bulky hydrophobic or aromatic side chain (e.g., Val, His, Ile or Trp) is substituted for, or by, one having a smaller side chain (e.g., Ala or Ser) or no side chain (e.g., Gly).

[0831] Other amino acid substitutions can be readily identified by workers of ordinary skill. For example, for the amino acid alanine, a substitution can be taken from any one of D-alanine, glycine, beta-alanine, L-cysteine and D-cysteine. For lysine, a replacement can be any one of D-lysine, arginine, D-arginine, homo-arginine, methionine, D-methionine, ornithine, or D-ornithine. Generally, substitutions in functionally important regions that can be expected to induce changes in the properties of isolated polypeptides are those in which (i) a polar residue, e.g., serine or threonine, is substituted for (or by) a hydrophobic residue, e.g., leucine, isoleucine, phenylalanine, or alanine; (ii) a cysteine residue is substituted for (or by) any other residue; (iii) a residue having an electropositive side chain, e.g., lysine, arginine or histidine, is substituted for (or by) a residue having an electronegative side chain, e.g., glutamic acid or aspartic acid; or (iv) a residue having a bulky side chain, e.g., phenylalanine, is substituted for (or by) one not having such a side chain, e.g., glycine. The likelihood that one of the foregoing non-conservative substitutions can alter functional properties of the protein is also correlated to the position of the substitution with respect to functionally important regions of the protein: some non-conservative substitutions can accordingly have little or no effect on biological properties.

[0832] Conserved: As used herein, the term “conserved” refers to nucleotides or amino acid residues of a polynucleotide sequence or polypeptide sequence, respectively, that are those that occur unaltered in the same position of two or more sequences being compared. Nucleotides or amino acids that are relatively conserved are those that are conserved amongst more related sequences than nucleotides or amino acids appearing elsewhere in the sequences.

[0833] In some embodiments, two or more sequences are said to be “completely conserved” if they are 100% identical to one another. In some embodiments, two or more sequences are said to be “highly conserved” if they are at least 70% identical, at least 80% identical, at least 90% identical, or at least 95% identical to one another. In some embodiments, two or more sequences are said to be “highly conserved” if they are about 70% identical, about 80% identical, about 90% identical, about 95%, about 98%, or about 99% identical to one another. In some embodiments, two or more sequences are said to be “conserved” if they are at least 30% identical, at least 40% identical, at least 50% identical, at least 60% identical, at least 70% identical, at least 80% identical, at least 90% identical, or at least 95% identical to one another. In some embodiments, two or more sequences are said to be “conserved” if they are about 30% identical, about 40% identical, about 50% identical, about 60% identical, about 70% identical, about 80% identical, about 90% identical, about 95% identical, about 98% identical, or about 99% identical to one another. Conservation of sequence can apply to the entire length of an polynucleotide or polypeptide or can apply to a portion, region or feature thereof.

[0834] Controlled Release: As used herein, the term “controlled release” refers to a pharmaceutical composition or compound release profile that conforms to a particular pattern of release to effect a therapeutic outcome.

[0835] Cyclic or Cyclized: As used herein, the term “cyclic” refers to the presence of a continuous loop. Cyclic molecules need not be circular, only joined to form an unbroken chain of subunits. Cyclic molecules such as the engineered RNA or mRNA of the present invention can be single units or multimers or comprise one or more components of a complex or higher order structure.

[0836] Cytotoxic: As used herein, “cytotoxic” refers to killing or causing injurious, toxic, or deadly effect on a cell (e.g., a mammalian cell (e.g., a human cell)), bacterium, virus, fungus, protozoan, parasite, prion, or a combination thereof.

[0837] Delivering: As used herein, the term “delivering” means providing an entity to a destination. For example, delivering a polynucleotide to a subject can involve administering a nanoparticle composition including the polynucleotide to the subject (e.g., by an intravenous, intramuscular, intradermal, or subcutaneous route). Administration of a nanoparticle composition to a mammal or mammalian cell can involve contacting one or more cells with the nanoparticle composition.

[0838] Delivery Agent: As used herein, “delivery agent” refers to any substance that facilitates, at least in part, the in vivo, in vitro, or ex vivo delivery of a polynucleotide to targeted cells.

[0839] Destabilized: As used herein, the term “destable,” “destabilize,” or “destabilizing region” means a region or molecule that is less stable than a starting, wild-type or native form of the same region or molecule.

[0840] Diastereomer: As used herein, the term “diastereomer,” means stereoisomers that are not mirror images of one another and are non-superimposable on one another.

[0841] Digest: As used herein, the term “digest” means to break apart into smaller pieces or components. When referring to polypeptides or proteins, digestion results in the production of peptides.

[0842] Distal: As used herein, the term “distal” means situated away from the center or away from a point or region of interest.

[0843] Domain: As used herein, when referring to polypeptides, the term “domain” refers to a motif of a polypeptide having one or more identifiable structural or functional characteristics or properties (e.g., binding capacity, serving as a site for protein-protein interactions).

[0844] Dosing regimen: As used herein, a “dosing regimen” or a “dosing regimen” is a schedule of administration or physician determined regimen of treatment, prophylaxis, or palliative care.

[0845] Effective Amount: As used herein, the term “effective amount” of an agent is that amount sufficient to effect beneficial or desired results, for example, clinical results, and, as such, an “effective amount” depends upon the context in which it is being applied. For example, in the context of administering an agent that treats a protein deficiency (e.g., a ABCB4, ABCB11, and/or ATP8B1 deficiency), an effective amount of an agent is, for example, an amount of mRNA expressing sufficient ABCB4, ABCB11, and/or ATP8B1 to ameliorate, reduce, eliminate, or prevent the symptoms associated with the ABCB4, ABCB11, and/or ATP8B1 deficiency, as compared to the severity of the symptom observed without administration of the agent. The term “effective amount” can be used interchangeably with “effective dose,” “therapeutically effective amount,” or “therapeutically effective dose.”

[0846] Enantiomer: As used herein, the term “enantiomer” means each individual optically active form of a compound of the invention, having an optical purity or enantiomeric excess (as determined by methods standard in the art) of at least 80% (i.e., at least 90% of one enantiomer and at most 10% of the other enantiomer), at least 90%, or at least 98%.

[0847] Encapsulate: As used herein, the term “encapsulate” means to enclose, surround or encase.

[0848] Encapsulation Efficiency: As used herein, “encapsulation efficiency” refers to the amount of a polynucleotide that becomes part of a nanoparticle composition, relative to the initial total amount of polynucleotide used in the preparation of a nanoparticle composition. For example, if 97 mg of polynucleotide are encapsulated in a nanoparticle composition out of a total 100 mg of polynucleotide initially provided to the composition, the encapsulation efficiency can be given as 97%. As used herein, “encapsulation” can refer to complete, substantial, or partial enclosure, confinement, surrounding, or encasement.

[0849] Encoded protein cleavage signal: As used herein, “encoded protein cleavage signal” refers to the nucleotide sequence that encodes a protein cleavage signal.

[0850] Engineered: As used herein, embodiments of the invention are “engineered” when they are designed to have a feature or property, whether structural or chemical, that varies from a starting point, wild type or native molecule.

[0851] Enhanced Delivery: As used herein, the term “enhanced delivery” means delivery of more (e.g., at least 1.5 fold more, at least 2-fold more, at least 3-fold more, at least 4-fold more, at least 5-fold more, at least 6-fold more, at least 7-fold more, at least 8-fold more, at least 9-fold more, at least 10-fold more) of a polynucleotide by a nanoparticle to a target tissue of interest (e.g., mammalian liver) compared to the level of delivery of a polynucleotide by a control nanoparticle to a target tissue of interest (e.g., MC3, KC2, or DLinDMA). The level of delivery of a nanoparticle to a particular tissue can be measured by comparing the amount of protein produced in a tissue to the weight of said tissue, comparing the amount of polynucleotide in a tissue to the weight of said tissue, comparing the amount of protein produced in a tissue to the amount of total protein in said tissue, or comparing the amount of polynucleotide in a tissue to the amount of total polynucleotide in said tissue. It will be understood that the enhanced delivery of a nanoparticle to a target tissue need not be determined in a subject being treated, it can be determined in a surrogate such as an animal model (e.g., a rat model).

[0852] Exosome: As used herein, “exosome” is a vesicle secreted by mammalian cells or a complex involved in RNA degradation.

[0853] Expression: As used herein, “expression” of a nucleic acid sequence refers to one or more of the following events: (1) production of an mRNA template from a DNA sequence (e.g., by transcription); (2) processing of an mRNA transcript (e.g., by splicing, editing, 5′ cap formation, and/or 3′ end processing); (3) translation of an mRNA into a polypeptide or protein; and (4) post-translational modification of a polypeptide or protein.

[0854] Ex Vivo: As used herein, the term “ex vivo” refers to events that occur outside of an organism (e.g., animal, plant, or microbe or cell or tissue thereof). Ex vivo events can take place in an environment minimally altered from a natural (e.g., in vivo) environment.

[0855] Feature: As used herein, a “feature” refers to a characteristic, a property, or a distinctive element. When referring to polypeptides, “features” are defined as distinct amino acid sequence-based components of a molecule. Features of the polypeptides encoded by the polynucleotides of the present invention include surface manifestations, local conformational shape, folds, loops, half-loops, domains, half-domains, sites, termini or any combination thereof.

[0856] Formulation: As used herein, a “formulation” includes at least a polynucleotide and one or more of a carrier, an excipient, and a delivery agent.

[0857] Fragment: A “fragment,” as used herein, refers to a portion. For example, fragments of proteins can comprise polypeptides obtained by digesting full-length protein isolated from cultured cells. In some embodiments, a fragment is a subsequences of a full length protein (e.g., ABCB4, ABCB11, or ATP8B1) wherein N-terminal, and/or C-terminal, and/or internal subsequences have been deleted. In some preferred aspects of the present invention, the fragments of a protein of the present invention are functional fragments.

[0858] Functional: As used herein, a “functional” biological molecule is a biological molecule in a form in which it exhibits a property and/or activity by which it is characterized. Thus, a functional fragment of a polynucleotide of the present invention is a polynucleotide capable of expressing a functional ABCB4, ABCB11, or ATP8B1 fragment. As used herein, a functional fragment of ABCB4, ABCB11, or ATP8B1 refers to a fragment of wild type ABCB4, ABCB11, or ATP8B1 (i.e., a fragment of any of its naturally occurring isoforms), or a mutant or variant thereof, wherein the fragment retains a least about 10%, at least about 15%, at least about 20%, at least about 25%, at least about 30%, at least about 35%, at least about 40%, at least about 45%, at least about 50%, at least about 55%, at least about 60%, at least about 65%, at least about 70%, at least about 75%, at least about 80%, at least about 85%, at least about 90%, or at least about 95% of the biological activity of the corresponding full length protein.

[0859] Helper Lipid: As used herein, the term “helper lipid” refers to a compound or molecule that includes a lipidic moiety (for insertion into a lipid layer, e.g., lipid bilayer) and a polar moiety (for interaction with physiologic solution at the surface of the lipid layer). Typically the helper lipid is a phospholipid. A function of the helper lipid is to “complement” the amino lipid and increase the fusogenicity of the bilayer and/or to help facilitate endosomal escape, e.g., of nucleic acid delivered to cells. Helper lipids are also believed to be a key structural component to the surface of the LNP.

[0860] Homology: As used herein, the term “homology” refers to the overall relatedness between polymeric molecules, e.g. between nucleic acid molecules (e.g. DNA molecules and/or RNA molecules) and/or between polypeptide molecules. Generally, the term “homology” implies an evolutionary relationship between two molecules. Thus, two molecules that are homologous will have a common evolutionary ancestor. In the context of the present invention, the term homology encompasses both to identity and similarity.

[0861] In some embodiments, polymeric molecules are considered to be “homologous” to one another if at least 25%, 30%, 35%, 40%, 45%, 50%, 55%, 60%, 65%, 70%, 75%, 80%, 85%, 90%, 95%, or 99% of the monomers in the molecule are identical (exactly the same monomer) or are similar (conservative substitutions). The term “homologous” necessarily refers to a comparison between at least two sequences (polynucleotide or polypeptide sequences).

[0862] Identity: As used herein, the term “identity” refers to the overall monomer conservation between polymeric molecules, e.g., between polynucleotide molecules (e.g. DNA molecules and/or RNA molecules) and/or between polypeptide molecules. Calculation of the percent identity of two polynucleotide sequences, for example, can be performed by aligning the two sequences for optimal comparison purposes (e.g., gaps can be introduced in one or both of a first and a second nucleic acid sequences for optimal alignment and non-identical sequences can be disregarded for comparison purposes). In certain embodiments, the length of a sequence aligned for comparison purposes is at least 30%, at least 40%, at least 50%, at least 60%, at least 70%, at least 80%, at least 90%, at least 95%, or 100% of the length of the reference sequence. The nucleotides at corresponding nucleotide positions are then compared. When a position in the first sequence is occupied by the same nucleotide as the corresponding position in the second sequence, then the molecules are identical at that position. The percent identity between the two sequences is a function of the number of identical positions shared by the sequences, taking into account the number of gaps, and the length of each gap, which needs to be introduced for optimal alignment of the two sequences. The comparison of sequences and determination of percent identity between two sequences can be accomplished using a mathematical algorithm. When comparing DNA and RNA, thymine (T) and uracil (U) can be considered equivalent.

[0863] Suitable software programs are available from various sources, and for alignment of both protein and nucleotide sequences. One suitable program to determine percent sequence identity is bl2seq, part of the BLAST suite of program available from the U.S. government's National Center for Biotechnology Information BLAST web site (blast.ncbi.nlm.nih.gov). Bl2seq performs a comparison between two sequences using either the BLASTN or BLASTP algorithm. BLASTN is used to compare nucleic acid sequences, while BLASTP is used to compare amino acid sequences. Other suitable programs are, e.g., Needle, Stretcher, Water, or Matcher, part of the EMBOSS suite of bioinformatics programs and also available from the European Bioinformatics Institute (EBI) at www.ebi.ac.uk/Tools/psa.

[0864] Sequence alignments can be conducted using methods known in the art such as MAFFT, Clustal (ClustalW, Clustal X or Clustal Omega), MUSCLE, etc. Different regions within a single polynucleotide or polypeptide target sequence that aligns with a polynucleotide or polypeptide reference sequence can each have their own percent sequence identity. It is noted that the percent sequence identity value is rounded to the nearest tenth. For example, 80.11, 80.12, 80.13, and 80.14 are rounded down to 80.1, while 80.15, 80.16, 80.17, 80.18, and 80.19 are rounded up to 80.2. It also is noted that the length value will always be an integer.

[0865] In certain aspects, the percentage identity “%ID” of a first amino acid sequence (or nucleic acid sequence) to a second amino acid sequence (or nucleic acid sequence) is calculated as % ID=100×(Y/Z), where Y is the number of amino acid residues (or nucleobases) scored as identical matches in the alignment of the first and second sequences (as aligned by visual inspection or a particular sequence alignment program) and Z is the total number of residues in the second sequence. If the length of a first sequence is longer than the second sequence, the percent identity of the first sequence to the second sequence will be higher than the percent identity of the second sequence to the first sequence.

[0866] One skilled in the art will appreciate that the generation of a sequence alignment for the calculation of a percent sequence identity is not limited to binary sequence-sequence comparisons exclusively driven by primary sequence data. It will also be appreciated that sequence alignments can be generated by integrating sequence data with data from heterogeneous sources such as structural data (e.g., crystallographic protein structures), functional data (e.g., location of mutations), or phylogenetic data. A suitable program that integrates heterogeneous data to generate a multiple sequence alignment is T-Coffee, available at www.tcoffee.org, and alternatively available, e.g., from the EBI. It will also be appreciated that the final alignment used to calculate percent sequence identity can be curated either automatically or manually.

[0867] Immune response: The term “immune response” refers to the action of, for example, lymphocytes, antigen presenting cells, phagocytic cells, granulocytes, and soluble macromolecules produced by the above cells or the liver (including antibodies, cytokines, and complement) that results in selective damage to, destruction of, or elimination from the human body of invading pathogens, cells or tissues infected with pathogens, cancerous cells, or, in cases of autoimmunity or pathological inflammation, normal human cells or tissues. In some cases, the administration of a nanoparticle comprising a lipid component and an encapsulated therapeutic agent can trigger an immune response, which can be caused by (i) the encapsulated therapeutic agent (e.g., an mRNA), (ii) the expression product of such encapsulated therapeutic agent (e.g., a polypeptide encoded by the mRNA), (iii) the lipid component of the nanoparticle, or (iv) a combination thereof.

[0868] Inflammatory response: “Inflammatory response” refers to immune responses involving specific and non-specific defense systems. A specific defense system reaction is a specific immune system reaction to an antigen. Examples of specific defense system reactions include antibody responses. A non-specific defense system reaction is an inflammatory response mediated by leukocytes generally incapable of immunological memory, e.g., macrophages, eosinophils and neutrophils. In some aspects, an immune response includes the secretion of inflammatory cytokines, resulting in elevated inflammatory cytokine levels.

[0869] Inflammatory cytokines: The term “inflammatory cytokine” refers to cytokines that are elevated in an inflammatory response. Examples of inflammatory cytokines include interleukin-6 (IL-6), CXCL1 (chemokine (C-X-C motif) ligand 1; also known as GROα, interferon-γ (IFNγ), tumor necrosis factor α (TNFα), interferon γ-induced protein 10 (IP-10), or granulocyte-colony stimulating factor (G-CSF). The term inflammatory cytokines includes also other cytokines associated with inflammatory responses known in the art, e.g., interleukin-1 (IL-1), interleukin-8 (IL-8), interleukin-12 (IL-12), interleukin-13 (Il-13), interferon α (IFN-α), etc.

[0870] In Vitro: As used herein, the term “in vitro” refers to events that occur in an artificial environment, e.g., in a test tube or reaction vessel, in cell culture, in a Petri dish, etc., rather than within an organism (e.g., animal, plant, or microbe).

[0871] In Vivo: As used herein, the term “in vivo” refers to events that occur within an organism (e.g., animal, plant, or microbe or cell or tissue thereof).

[0872] Insertional and deletional variants: “Insertional variants” when referring to polypeptides are those with one or more amino acids inserted immediately adjacent to an amino acid at a particular position in a native or starting sequence. “Immediately adjacent” to an amino acid means connected to either the alpha-carboxy or alpha-amino functional group of the amino acid. “Deletional variants” when referring to polypeptides are those with one or more amino acids in the native or starting amino acid sequence removed. Ordinarily, deletional variants will have one or more amino acids deleted in a particular region of the molecule.

[0873] Intact: As used herein, in the context of a polypeptide, the term “intact” means retaining an amino acid corresponding to the wild type protein, e.g., not mutating or substituting the wild type amino acid. Conversely, in the context of a nucleic acid, the term “intact” means retaining a nucleobase corresponding to the wild type nucleic acid, e.g., not mutating or substituting the wild type nucleobase.

[0874] Ionizable amino lipid: The term “ionizable amino lipid” includes those lipids having one, two, three, or more fatty acid or fatty alkyl chains and a pH-titratable amino head group (e.g., an alkylamino or dialkylamino head group). An ionizable amino lipid is typically protonated (i.e., positively charged) at a pH below the pKa of the amino head group and is substantially not charged at a pH above the pKa. Such ionizable amino lipids include, but are not limited to DLin-MC3-DMA (MC3) and (13Z,165Z)-N,N-dimethyl-3-nonydocosa-13-16-dien-1-amine (L608).

[0875] Isolated: As used herein, the term “isolated” refers to a substance or entity that has been separated from at least some of the components with which it was associated (whether in nature or in an experimental setting). Isolated substances (e.g., polynucleotides or polypeptides) can have varying levels of purity in reference to the substances from which they have been isolated. Isolated substances and/or entities can be separated from at least about 10%, about 20%, about 30%, about 40%, about 50%, about 60%, about 70%, about 80%, about 90%, or more of the other components with which they were initially associated. In some embodiments, isolated substances are more than about 80%, about 85%, about 90%, about 91%, about 92%, about 93%, about 94%, about 95%, about 96%, about 97%, about 98%, about 99%, or more than about 99% pure. As used herein, a substance is “pure” if it is substantially free of other components.

[0876] Substantially isolated: By “substantially isolated” is meant that the compound is substantially separated from the environment in which it was formed or detected. Partial separation can include, for example, a composition enriched in the compound of the present disclosure. Substantial separation can include compositions containing at least about 50%, at least about 60%, at least about 70%, at least about 80%, at least about 90%, at least about 95%, at least about 97%, or at least about 99% by weight of the compound of the present disclosure, or salt thereof.

[0877] A polynucleotide, vector, polypeptide, cell, or any composition disclosed herein which is “isolated” is a polynucleotide, vector, polypeptide, cell, or composition which is in a form not found in nature. Isolated polynucleotides, vectors, polypeptides, or compositions include those which have been purified to a degree that they are no longer in a form in which they are found in nature. In some aspects, a polynucleotide, vector, polypeptide, or composition which is isolated is substantially pure.

[0878] Isomer: As used herein, the term “isomer” means any tautomer, stereoisomer, enantiomer, or diastereomer of any compound of the invention. It is recognized that the compounds of the invention can have one or more chiral centers and/or double bonds and, therefore, exist as stereoisomers, such as double-bond isomers (i.e., geometric E/Z isomers) or diastereomers (e.g., enantiomers (i.e., (+) or (−)) or cis/trans isomers). According to the invention, the chemical structures depicted herein, and therefore the compounds of the invention, encompass all of the corresponding stereoisomers, that is, both the stereomerically pure form (e.g., geometrically pure, enantiomerically pure, or diastereomerically pure) and enantiomeric and stereoisomeric mixtures, e.g., racemates. Enantiomeric and stereoisomeric mixtures of compounds of the invention can typically be resolved into their component enantiomers or stereoisomers by well-known methods, such as chiral-phase gas chromatography, chiral-phase high performance liquid chromatography, crystallizing the compound as a chiral salt complex, or crystallizing the compound in a chiral solvent. Enantiomers and stereoisomers can also be obtained from stereomerically or enantiomerically pure intermediates, reagents, and catalysts by well-known asymmetric synthetic methods.

[0879] Linker: As used herein, a “linker” refers to a group of atoms, e.g., 10-1,000 atoms, and can be comprised of the atoms or groups such as, but not limited to, carbon, amino, alkylamino, oxygen, sulfur, sulfoxide, sulfonyl, carbonyl, and imine. The linker can be attached to a modified nucleoside or nucleotide on the nucleobase or sugar moiety at a first end, and to a payload, e.g., a detectable or therapeutic agent, at a second end. The linker can be of sufficient length as to not interfere with incorporation into a nucleic acid sequence. The linker can be used for any useful purpose, such as to form polynucleotide multimers (e.g., through linkage of two or more chimeric polynucleotides molecules or IVT polynucleotides) or polynucleotides conjugates, as well as to administer a payload, as described herein. Examples of chemical groups that can be incorporated into the linker include, but are not limited to, alkyl, alkenyl, alkynyl, amido, amino, ether, thioether, ester, alkylene, heteroalkylene, aryl, or heterocyclyl, each of which can be optionally substituted, as described herein. Examples of linkers include, but are not limited to, unsaturated alkanes, polyethylene glycols (e.g., ethylene or propylene glycol monomeric units, e.g., diethylene glycol, dipropylene glycol, triethylene glycol, tripropylene glycol, tetraethylene glycol, or tetraethylene glycol), and dextran polymers and derivatives thereof., Other examples include, but are not limited to, cleavable moieties within the linker, such as, for example, a disulfide bond (—S—S—) or an azo bond (—N═N—), which can be cleaved using a reducing agent or photolysis. Non-limiting examples of a selectively cleavable bond include an amido bond can be cleaved for example by the use of tris(2-carboxyethyl)phosphine (TCEP), or other reducing agents, and/or photolysis, as well as an ester bond can be cleaved for example by acidic or basic hydrolysis.

[0880] Methods of Administration: As used herein, “methods of administration” can include intravenous, intramuscular, intradermal, subcutaneous, or other methods of delivering a composition to a subject. A method of administration can be selected to target delivery (e.g., to specifically deliver) to a specific region or system of a body.

[0881] Modified: As used herein “modified” refers to a changed state or structure of a molecule of the invention. Molecules can be modified in many ways including chemically, structurally, and functionally. In some embodiments, the mRNA molecules of the present invention are modified by the introduction of non-natural nucleosides and/or nucleotides, e.g., as it relates to the natural ribonucleotides A, U, G, and C. Noncanonical nucleotides such as the cap structures are not considered “modified” although they differ from the chemical structure of the A, C, G, U ribonucleotides.

[0882] Mucus: As used herein, “mucus” refers to the natural substance that is viscous and comprises mucin glycoproteins.

[0883] Nanoparticle Composition: As used herein, a “nanoparticle composition” is a composition comprising one or more lipids. Nanoparticle compositions are typically sized on the order of micrometers or smaller and can include a lipid bilayer. Nanoparticle compositions encompass lipid nanoparticles (LNPs), liposomes (e.g., lipid vesicles), and lipoplexes. For example, a nanoparticle composition can be a liposome having a lipid bilayer with a diameter of 500 nm or less.

[0884] Naturally occurring: As used herein, “naturally occurring” means existing in nature without artificial aid.

[0885] Non-human vertebrate: As used herein, a “non-human vertebrate” includes all vertebrates except Homo sapiens, including wild and domesticated species. Examples of non-human vertebrates include, but are not limited to, mammals, such as alpaca, banteng, bison, camel, cat, cattle, deer, dog, donkey, gayal, goat, guinea pig, horse, llama, mule, pig, rabbit, reindeer, sheep water buffalo, and yak.

[0886] Nucleic acid sequence: The terms “nucleic acid sequence,” “nucleotide sequence,” or “polynucleotide sequence” are used interchangeably and refer to a contiguous nucleic acid sequence. The sequence can be either single stranded or double stranded DNA or RNA, e.g., an mRNA.

[0887] The term “nucleic acid,” in its broadest sense, includes any compound and/or substance that comprises a polymer of nucleotides. These polymers are often referred to as polynucleotides. Exemplary nucleic acids or polynucleotides of the invention include, but are not limited to, ribonucleic acids (RNAs), deoxyribonucleic acids (DNAs), threose nucleic acids (TNAs), glycol nucleic acids (GNAs), peptide nucleic acids (PNAs), locked nucleic acids (LNAs, including LNA having a β-D-ribo configuration, α-LNA having an α-L-ribo configuration (a diastereomer of LNA), 2′-amino-LNA having a 2′-amino functionalization, and 2′-amino-α-LNA having a 2′-amino functionalization), ethylene nucleic acids (ENA), cyclohexenyl nucleic acids (CeNA) or hybrids or combinations thereof.

[0888] The phrase “nucleotide sequence encoding” refers to the nucleic acid (e.g., an mRNA or DNA molecule) coding sequence which encodes a polypeptide. The coding sequence can further include initiation and termination signals operably linked to regulatory elements including a promoter and polyadenylation signal capable of directing expression in the cells of an individual or mammal to which the nucleic acid is administered. The coding sequence can further include sequences that encode signal peptides.

[0889] Off-target: As used herein, “off target” refers to any unintended effect on any one or more target, gene, or cellular transcript.

[0890] Open reading frame: As used herein, “open reading frame” or “ORF” refers to a sequence which does not contain a stop codon in a given reading frame.

[0891] Operably linked: As used herein, the phrase “operably linked” refers to a functional connection between two or more molecules, constructs, transcripts, entities, moieties or the like.

[0892] Optionally substituted: Herein a phrase of the form “optionally substituted X” (e.g., optionally substituted alkyl) is intended to be equivalent to “X, wherein X is optionally substituted” (e.g., “alkyl, wherein said alkyl is optionally substituted”). It is not intended to mean that the feature “X” (e.g., alkyl) per se is optional.

[0893] Part: As used herein, a “part” or “region” of a polynucleotide is defined as any portion of the polynucleotide that is less than the entire length of the polynucleotide.

[0894] Patient: As used herein, “patient” refers to a subject who can seek or be in need of treatment, requires treatment, is receiving treatment, will receive treatment, or a subject who is under care by a trained professional for a particular disease or condition. In some embodiments, the treatment is needed, required, or received to prevent or decrease the risk of developing acute disease, i.e., it is a prophylactic treatment.

[0895] Pharmaceutically acceptable: The phrase “pharmaceutically acceptable” is employed herein to refer to those compounds, materials, compositions, and/or dosage forms that are, within the scope of sound medical judgment, suitable for use in contact with the tissues of human beings and animals without excessive toxicity, irritation, allergic response, or other problem or complication, commensurate with a reasonable benefit/risk ratio.

[0896] Pharmaceutically acceptable excipients: The phrase “pharmaceutically acceptable excipient,” as used herein, refers any ingredient other than the compounds described herein (for example, a vehicle capable of suspending or dissolving the active compound) and having the properties of being substantially nontoxic and non-inflammatory in a patient. Excipients can include, for example: antiadherents, antioxidants, binders, coatings, compression aids, disintegrants, dyes (colors), emollients, emulsifiers, fillers (diluents), film formers or coatings, flavors, fragrances, glidants (flow enhancers), lubricants, preservatives, printing inks, sorbents, suspensing or dispersing agents, sweeteners, and waters of hydration. Exemplary excipients include, but are not limited to: butylated hydroxytoluene (BHT), calcium carbonate, calcium phosphate (dibasic), calcium stearate, croscarmellose, crosslinked polyvinyl pyrrolidone, citric acid, crospovidone, cysteine, ethylcellulose, gelatin, hydroxypropyl cellulose, hydroxypropyl methylcellulose, lactose, magnesium stearate, maltitol, mannitol, methionine, methylcellulose, methyl paraben, microcrystalline cellulose, polyethylene glycol, polyvinyl pyrrolidone, povidone, pregelatinized starch, propyl paraben, retinyl palmitate, shellac, silicon dioxide, sodium carboxymethyl cellulose, sodium citrate, sodium starch glycolate, sorbitol, starch (corn), stearic acid, sucrose, talc, titanium dioxide, vitamin A, vitamin E, vitamin C, and xylitol.

[0897] Pharmaceutically acceptable salts: The present disclosure also includes pharmaceutically acceptable salts of the compounds described herein. As used herein, “pharmaceutically acceptable salts” refers to derivatives of the disclosed compounds wherein the parent compound is modified by converting an existing acid or base moiety to its salt form (e.g., by reacting the free base group with a suitable organic acid). Examples of pharmaceutically acceptable salts include, but are not limited to, mineral or organic acid salts of basic residues such as amines; alkali or organic salts of acidic residues such as carboxylic acids; and the like. Representative acid addition salts include acetate, acetic acid, adipate, alginate, ascorbate, aspartate, benzenesulfonate, benzene sulfonic acid, benzoate, bisulfate, borate, butyrate, camphorate, camphorsulfonate, citrate, cyclopentanepropionate, digluconate, dodecylsulfate, ethanesulfonate, fumarate, glucoheptonate, glycerophosphate, hemisulfate, heptonate, hexanoate, hydrobromide, hydrochloride, hydroiodide, 2-hydroxy-ethanesulfonate, lactobionate, lactate, laurate, lauryl sulfate, malate, maleate, malonate, methanesulfonate, 2-naphthalenesulfonate, nicotinate, nitrate, oleate, oxalate, palmitate, pamoate, pectinate, persulfate, 3-phenylpropionate, phosphate, picrate, pivalate, propionate, stearate, succinate, sulfate, tartrate, thiocyanate, toluenesulfonate, undecanoate, valerate salts, and the like. Representative alkali or alkaline earth metal salts include sodium, lithium, potassium, calcium, magnesium, and the like, as well as nontoxic ammonium, quaternary ammonium, and amine cations, including, but not limited to ammonium, tetramethylammonium, tetraethylammonium, methylamine, dimethyl amine, trimethylamine, triethylamine, ethylamine, and the like. The pharmaceutically acceptable salts of the present disclosure include the conventional non-toxic salts of the parent compound formed, for example, from non-toxic inorganic or organic acids. The pharmaceutically acceptable salts of the present disclosure can be synthesized from the parent compound that contains a basic or acidic moiety by conventional chemical methods. Generally, such salts can be prepared by reacting the free acid or base forms of these compounds with a stoichiometric amount of the appropriate base or acid in water or in an organic solvent, or in a mixture of the two; generally, nonaqueous media like ether, ethyl acetate, ethanol, isopropanol, or acetonitrile are used. Lists of suitable salts are found in Remington's Pharmaceutical Sciences, 17^{th} ed., Mack Publishing Company, Easton, Pa., 1985, p. 1418, Pharmaceutical Salts: Properties, Selection, and Use, P. H. Stahl and C. G. Wermuth (eds.), Wiley-VCH, 2008, and Berge et al., Journal of Pharmaceutical Science, 66, 1-19 (1977), each of which is incorporated herein by reference in its entirety.

[0898] Pharmaceutically acceptable solvate: The term “pharmaceutically acceptable solvate,” as used herein, means a compound of the invention wherein molecules of a suitable solvent are incorporated in the crystal lattice. A suitable solvent is physiologically tolerable at the dosage administered. For example, solvates can be prepared by crystallization, recrystallization, or precipitation from a solution that includes organic solvents, water, or a mixture thereof. Examples of suitable solvents are ethanol, water (for example, mono-, di-, and tri-hydrates), N-methylpyrrolidinone (NMP), dimethyl sulfoxide (DMSO), N,N′-dimethylformamide (DMF), N,N′-dimethylacetamide (DMAC), 1,3-dimethyl-2-imidazolidinone (DMEU), 1,3-dimethyl-3,4,5,6-tetrahydro-2-(1H)-pyrimidinone (DMPU), acetonitrile (ACN), propylene glycol, ethyl acetate, benzyl alcohol, 2-pyrrolidone, benzyl benzoate, and the like. When water is the solvent, the solvate is referred to as a “hydrate.”

[0899] Pharmacokinetic: As used herein, “pharmacokinetic” refers to any one or more properties of a molecule or compound as it relates to the determination of the fate of substances administered to a living organism. Pharmacokinetics is divided into several areas including the extent and rate of absorption, distribution, metabolism and excretion. This is commonly referred to as ADME where: (A) Absorption is the process of a substance entering the blood circulation; (D) Distribution is the dispersion or dissemination of substances throughout the fluids and tissues of the body; (M) Metabolism (or Biotransformation) is the irreversible transformation of parent compounds into daughter metabolites; and (E) Excretion (or Elimination) refers to the elimination of the substances from the body. In rare cases, some drugs irreversibly accumulate in body tissue.

[0900] Physicochemical: As used herein, “physicochemical” means of or relating to a physical and/or chemical property.

[0901] Polynucleotide: The term “polynucleotide” as used herein refers to polymers of nucleotides of any length, including ribonucleotides, deoxyribonucleotides, analogs thereof, or mixtures thereof. This term refers to the primary structure of the molecule. Thus, the term includes triple-, double- and single-stranded deoxyribonucleic acid (“DNA”), as well as triple-, double- and single-stranded ribonucleic acid (“RNA”). It also includes modified, for example by alkylation, and/or by capping, and unmodified forms of the polynucleotide. More particularly, the term “polynucleotide” includes polydeoxyribonucleotides (containing 2-deoxy-D-ribose), polyribonucleotides (containing D-ribose), including tRNA, rRNA, hRNA, siRNA and mRNA, whether spliced or unspliced, any other type of polynucleotide which is an N- or C-glycoside of a purine or pyrimidine base, and other polymers containing normucleotidic backbones, for example, polyamide (e.g., peptide nucleic acids “PNAs”) and polymorpholino polymers, and other synthetic sequence-specific nucleic acid polymers providing that the polymers contain nucleobases in a configuration which allows for base pairing and base stacking, such as is found in DNA and RNA. In particular aspects, the polynucleotide comprises an mRNA. In other aspect, the mRNA is a synthetic mRNA. In some aspects, the synthetic mRNA comprises at least one unnatural nucleobase. In some aspects, all nucleobases of a certain class have been replaced with unnatural nucleobases (e.g., all uridines in a polynucleotide disclosed herein can be replaced with an unnatural nucleobase, e.g., 5-methoxyuridine). In some aspects, the polynucleotide (e.g., a synthetic RNA or a synthetic DNA) comprises only natural nucleobases, i.e., A (adenosine), G (guanosine), C (cytidine), and T (thymidine) in the case of a synthetic DNA, or A, C, G, and U (uridine) in the case of a synthetic RNA.

[0902] The skilled artisan will appreciate that the T bases in the codon maps disclosed herein are present in DNA, whereas the T bases would be replaced by U bases in corresponding RNAs. For example, a codon-nucleotide sequence disclosed herein in DNA form, e.g., a vector or an in-vitro translation (IVT) template, would have its T bases transcribed as U based in its corresponding transcribed mRNA. In this respect, both codon-optimized DNA sequences (comprising T) and their corresponding mRNA sequences (comprising U) are considered codon-optimized nucleotide sequence of the present invention. A skilled artisan would also understand that equivalent codon-maps can be generated by replaced one or more bases with non-natural bases. Thus, e.g., a TTC codon (DNA map) would correspond to a UUC codon (RNA map), which in turn would correspond to a ΨΨC codon (RNA map in which U has been replaced with pseudouridine).

[0903] Standard A-T and G-C base pairs form under conditions which allow the formation of hydrogen bonds between the N3-H and C4-oxy of thymidine and the N1 and C6-NH2, respectively, of adenosine and between the C2-oxy, N3 and C4-NH2, of cytidine and the C2-NH2, N′—H and C6-oxy, respectively, of guanosine. Thus, for example, guanosine (2-amino-6-oxy-9-β-D-ribofuranosyl-purine) can be modified to form isoguanosine (2-oxy-6-amino-9-β-D-ribofuranosyl-purine). Such modification results in a nucleoside base which will no longer effectively form a standard base pair with cytosine. However, modification of cytosine (1-β-D-ribofuranosyl-2-oxy-4-amino-pyrimidine) to form isocytosine (1-β-D-ribofuranosyl-2-amino-4-oxy-pyrimidine-) results in a modified nucleotide which will not effectively base pair with guanosine but will form a base pair with isoguanosine (U.S. Pat. No. 5,681,702 to Collins et al.). Isocytosine is available from Sigma Chemical Co. (St. Louis, Mo.); isocytidine can be prepared by the method described by Switzer et al. (1993) Biochemistry 32:10489-10496 and references cited therein; 2′-deoxy-5-methyl-isocytidine can be prepared by the method of Tor et al., 1993, J. Am. Chem. Soc. 115:4461-4467 and references cited therein; and isoguanine nucleotides can be prepared using the method described by Switzer et al., 1993, supra, and Mantsch et al., 1993, Biochem. 14:5593-5601, or by the method described in U.S. Pat. No. 5,780,610 to Collins et al. Other nonnatural base pairs can be synthesized by the method described in Piccirilli et al., 1990, Nature 343:33-37, for the synthesis of 2,6-diaminopyrimidine and its complement (1-methylpyrazolo-[4,3]pyrimidine-5,7-(4H,6H)-dione. Other such modified nucleotide units which form unique base pairs are known, such as those described in Leach et al. (1992) J. Am. Chem. Soc. 114:3675-3683 and Switzer et al., supra.

[0904] Polypeptide: The terms “polypeptide,” “peptide,” and “protein” are used interchangeably herein to refer to polymers of amino acids of any length. The polymer can comprise modified amino acids. The terms also encompass an amino acid polymer that has been modified naturally or by intervention; for example, disulfide bond formation, glycosylation, lipidation, acetylation, phosphorylation, or any other manipulation or modification, such as conjugation with a labeling component. Also included within the definition are, for example, polypeptides containing one or more analogs of an amino acid (including, for example, unnatural amino acids such as homocysteine, ornithine, p-acetylphenylalanine, D-amino acids, and creatine), as well as other modifications known in the art.

[0905] The term, as used herein, refers to proteins, polypeptides, and peptides of any size, structure, or function. Polypeptides include encoded polynucleotide products, naturally occurring polypeptides, synthetic polypeptides, homologs, orthologs, paralogs, fragments and other equivalents, variants, and analogs of the foregoing. A polypeptide can be a monomer or can be a multi-molecular complex such as a dimer, trimer or tetramer. They can also comprise single chain or multichain polypeptides. Most commonly disulfide linkages are found in multichain polypeptides. The term polypeptide can also apply to amino acid polymers in which one or more amino acid residues are an artificial chemical analogue of a corresponding naturally occurring amino acid. In some embodiments, a “peptide” can be less than or equal to 50 amino acids long, e.g., about 5, 10, 15, 20, 25, 30, 35, 40, 45, or 50 amino acids long.

[0906] Polypeptide variant: As used herein, the term “polypeptide variant” refers to molecules that differ in their amino acid sequence from a native or reference sequence. The amino acid sequence variants can possess substitutions, deletions, and/or insertions at certain positions within the amino acid sequence, as compared to a native or reference sequence. Ordinarily, variants will possess at least about 50% identity, at least about 60% identity, at least about 70% identity, at least about 80% identity, at least about 90% identity, at least about 95% identity, at least about 99% identity to a native or reference sequence. In some embodiments, they will be at least about 80%, or at least about 90% identical to a native or reference sequence.

[0907] Polypeptide per unit drug (PUD): As used herein, a PUD or product per unit drug, is defined as a subdivided portion of total daily dose, usually 1 mg, pg, kg, etc., of a product (such as a polypeptide) as measured in body fluid or tissue, usually defined in concentration such as pmol/mL, mmol/mL, etc. divided by the measure in the body fluid.

[0908] Preventing: As used herein, the term “preventing” refers to partially or completely delaying onset of an infection, disease, disorder and/or condition; partially or completely delaying onset of one or more symptoms, features, or clinical manifestations of a particular infection, disease, disorder, and/or condition; partially or completely delaying onset of one or more symptoms, features, or manifestations of a particular infection, disease, disorder, and/or condition; partially or completely delaying progression from an infection, a particular disease, disorder and/or condition; and/or decreasing the risk of developing pathology associated with the infection, the disease, disorder, and/or condition.

[0909] Proliferate: As used herein, the term “proliferate” means to grow, expand or increase or cause to grow, expand or increase rapidly. “Proliferative” means having the ability to proliferate. “Anti-proliferative” means having properties counter to or inapposite to proliferative properties.

[0910] Prophylactic: As used herein, “prophylactic” refers to a therapeutic or course of action used to prevent the spread of disease.

[0911] Prophylaxis: As used herein, a “prophylaxis” refers to a measure taken to maintain health and prevent the spread of disease. An “immune prophylaxis” refers to a measure to produce active or passive immunity to prevent the spread of disease.

[0912] Protein cleavage site: As used herein, “protein cleavage site” refers to a site where controlled cleavage of the amino acid chain can be accomplished by chemical, enzymatic or photochemical means.

[0913] Protein cleavage signal: As used herein “protein cleavage signal” refers to at least one amino acid that flags or marks a polypeptide for cleavage.

[0914] Protein of interest: As used herein, the terms “proteins of interest” or “desired proteins” include those provided herein and fragments, mutants, variants, and alterations thereof.

[0915] Proximal: As used herein, the term “proximal” means situated nearer to the center or to a point or region of interest.

[0916] Pseudouridine: As used herein, pseudouridine (w) refers to the C-glycoside isomer of the nucleoside uridine. A “pseudouridine analog” is any modification, variant, isoform or derivative of pseudouridine. For example, pseudouridine analogs include but are not limited to 1-carboxymethyl-pseudouridine, 1-propynyl-pseudouridine, 1-taurinomethyl-pseudouridine, 1-taurinomethyl-4-thio-pseudouridine, 1-methylpseudouridine (m¹ψ) (also known as N1-methyl-pseudouridine), 1-methyl-4-thio-pseudouridine (m¹s⁴ψ), 4-thio-1-methyl-pseudouridine, 3-methyl-pseudouridine (m³ψ), 2-thio-1-methyl-pseudouridine, 1-methyl-1-deaza-pseudouridine, 2-thio-1-methyl-1-deaza-pseudouridine, dihydropseudouridine, 2-thio-dihydropseudouridine, 2-methoxyuridine, 2-methoxy-4-thio-uridine, 4-methoxy-pseudouridine, 4-methoxy-2-thio-pseudouridine, 1-methyl-3-(3-amino-3-carboxypropyl)pseudouridine (acp³ ψ), and 2′-O-methyl-pseudouridine (ψm).

[0917] Purified: As used herein, “purify,” “purified,” “purification” means to make substantially pure or clear from unwanted components, material defilement, admixture or imperfection.

[0918] Reference Nucleic Acid Sequence: The term “reference nucleic acid sequence” or “reference nucleic acid” or “reference nucleotide sequence” or “reference sequence” refers to a starting nucleic acid sequence (e.g., a RNA, e.g., an mRNA sequence) that can be sequence optimized. In some embodiments, the reference nucleic acid sequence is a wild type nucleic acid sequence, a fragment or a variant thereof. In some embodiments, the reference nucleic acid sequence is a previously sequence optimized nucleic acid sequence.

[0919] Salts: In some aspects, the pharmaceutical composition for delivery disclosed herein and comprises salts of some of their lipid constituents. The term “salt” includes any anionic and cationic complex. Non-limiting examples of anions include inorganic and organic anions, e.g., fluoride, chloride, bromide, iodide, oxalate (e.g., hemioxalate), phosphate, phosphonate, hydrogen phosphate, dihydrogen phosphate, oxide, carbonate, bicarbonate, nitrate, nitrite, nitride, bisulfite, sulfide, sulfite, bisulfate, sulfate, thiosulfate, hydrogen sulfate, borate, formate, acetate, benzoate, citrate, tartrate, lactate, acrylate, polyacrylate, fumarate, maleate, itaconate, glycolate, gluconate, malate, mandelate, tiglate, ascorbate, salicylate, polymethacrylate, perchlorate, chlorate, chlorite, hypochlorite, bromate, hypobromite, iodate, an alkylsulfonate, an arylsulfonate, arsenate, arsenite, chromate, dichromate, cyanide, cyanate, thiocyanate, hydroxide, peroxide, permanganate, and mixtures thereof.

[0920] Sample: As used herein, the term “sample” or “biological sample” refers to a subset of its tissues, cells or component parts (e.g., body fluids, including but not limited to blood, mucus, lymphatic fluid, synovial fluid, cerebrospinal fluid, saliva, amniotic fluid, amniotic cord blood, urine, vaginal fluid and semen). A sample further can include a homogenate, lysate or extract prepared from a whole organism or a subset of its tissues, cells or component parts, or a fraction or portion thereof, including but not limited to, for example, plasma, serum, spinal fluid, lymph fluid, the external sections of the skin, respiratory, intestinal, and genitourinary tracts, tears, saliva, milk, blood cells, tumors, organs. A sample further refers to a medium, such as a nutrient broth or gel, which can contain cellular components, such as proteins or nucleic acid molecule.

[0921] Signal Sequence: As used herein, the phrases “signal sequence,” “signal peptide,” and “transit peptide” are used interchangeably and refer to a sequence that can direct the transport or localization of a protein to a certain organelle, cell compartment, or extracellular export. The term encompasses both the signal sequence polypeptide and the nucleic acid sequence encoding the signal sequence. Thus, references to a signal sequence in the context of a nucleic acid refer in fact to the nucleic acid sequence encoding the signal sequence polypeptide.

[0922] Signal transduction pathway: A “signal transduction pathway” refers to the biochemical relationship between a variety of signal transduction molecules that play a role in the transmission of a signal from one portion of a cell to another portion of a cell. As used herein, the phrase “cell surface receptor” includes, for example, molecules and complexes of molecules capable of receiving a signal and the transmission of such a signal across the plasma membrane of a cell.

[0923] Similarity: As used herein, the term “similarity” refers to the overall relatedness between polymeric molecules, e.g. between polynucleotide molecules (e.g. DNA molecules and/or RNA molecules) and/or between polypeptide molecules. Calculation of percent similarity of polymeric molecules to one another can be performed in the same manner as a calculation of percent identity, except that calculation of percent similarity takes into account conservative substitutions as is understood in the art.

[0924] Single unit dose: As used herein, a “single unit dose” is a dose of any therapeutic administered in one dose/at one time/single route/single point of contact, i.e., single administration event.

[0925] Split dose: As used herein, a “split dose” is the division of single unit dose or total daily dose into two or more doses.

[0926] Specific delivery: As used herein, the term “specific delivery,” “specifically deliver,” or “specifically delivering” means delivery of more (e.g., at least 1.5 fold more, at least 2-fold more, at least 3-fold more, at least 4-fold more, at least 5-fold more, at least 6-fold more, at least 7-fold more, at least 8-fold more, at least 9-fold more, at least 10-fold more) of a polynucleotide by a nanoparticle to a target tissue of interest (e.g., mammalian liver) compared to an off-target tissue (e.g., mammalian spleen). The level of delivery of a nanoparticle to a particular tissue can be measured by comparing the amount of protein produced in a tissue to the weight of said tissue, comparing the amount of polynucleotide in a tissue to the weight of said tissue, comparing the amount of protein produced in a tissue to the amount of total protein in said tissue, or comparing the amount of polynucleotide in a tissue to the amount of total polynucleotide in said tissue. For example, for renovascular targeting, a polynucleotide is specifically provided to a mammalian kidney as compared to the liver and spleen if 1.5, 2-fold, 3-fold, 5-fold, 10-fold, 15 fold, or 20 fold more polynucleotide per 1 g of tissue is delivered to a kidney compared to that delivered to the liver or spleen following systemic administration of the polynucleotide. It will be understood that the ability of a nanoparticle to specifically deliver to a target tissue need not be determined in a subject being treated, it can be determined in a surrogate such as an animal model (e.g., a rat model).

[0927] Stable: As used herein “stable” refers to a compound that is sufficiently robust to survive isolation to a useful degree of purity from a reaction mixture, and in some cases capable of formulation into an efficacious therapeutic agent.

[0928] Stabilized: As used herein, the term “stabilize,” “stabilized,” “stabilized region” means to make or become stable.

[0929] Stereoisomer: As used herein, the term “stereoisomer” refers to all possible different isomeric as well as conformational forms that a compound can possess (e.g., a compound of any formula described herein), in particular all possible stereochemically and conformationally isomeric forms, all diastereomers, enantiomers and/or conformers of the basic molecular structure. Some compounds of the present invention can exist in different tautomeric forms, all of the latter being included within the scope of the present invention.

[0930] Subject: By “subject” or “individual” or “animal” or “patient” or “mammal,” is meant any subject, particularly a mammalian subject, for whom diagnosis, prognosis, or therapy is desired. Mammalian subjects include, but are not limited to, humans, domestic animals, farm animals, zoo animals, sport animals, pet animals such as dogs, cats, guinea pigs, rabbits, rats, mice, horses, cattle, cows; primates such as apes, monkeys, orangutans, and chimpanzees; canids such as dogs and wolves; felids such as cats, lions, and tigers; equids such as horses, donkeys, and zebras; bears, food animals such as cows, pigs, and sheep; ungulates such as deer and giraffes; rodents such as mice, rats, hamsters and guinea pigs; and so on. In certain embodiments, the mammal is a human subject. In other embodiments, a subject is a human patient. In a particular embodiment, a subject is a human patient in need of treatment.

[0931] Substantially: As used herein, the term “substantially” refers to the qualitative condition of exhibiting total or near-total extent or degree of a characteristic or property of interest. One of ordinary skill in the biological arts will understand that biological and chemical characteristics rarely, if ever, go to completion and/or proceed to completeness or achieve or avoid an absolute result. The term “substantially” is therefore used herein to capture the potential lack of completeness inherent in many biological and chemical characteristics.

[0932] Substantially equal: As used herein as it relates to time differences between doses, the term means plus/minus 2%.

[0933] Substantially simultaneous: As used herein and as it relates to plurality of doses, the term means within 2 seconds.

[0934] Suffering from: An individual who is “suffering from” a disease, disorder, and/or condition has been diagnosed with or displays one or more symptoms of the disease, disorder, and/or condition.

[0935] Susceptible to: An individual who is “susceptible to” a disease, disorder, and/or condition has not been diagnosed with and/or cannot exhibit symptoms of the disease, disorder, and/or condition but harbors a propensity to develop a disease or its symptoms. In some embodiments, an individual who is susceptible to a disease, disorder, and/or condition (for example, a PFIC) can be characterized by one or more of the following: (1) a genetic mutation associated with development of the disease, disorder, and/or condition; (2) a genetic polymorphism associated with development of the disease, disorder, and/or condition; (3) increased and/or decreased expression and/or activity of a protein and/or nucleic acid associated with the disease, disorder, and/or condition; (4) habits and/or lifestyles associated with development of the disease, disorder, and/or condition; (5) a family history of the disease, disorder, and/or condition; and (6) exposure to and/or infection with a microbe associated with development of the disease, disorder, and/or condition. In some embodiments, an individual who is susceptible to a disease, disorder, and/or condition will develop the disease, disorder, and/or condition. In some embodiments, an individual who is susceptible to a disease, disorder, and/or condition will not develop the disease, disorder, and/or condition.

[0936] Sustained release: As used herein, the term “sustained release” refers to a pharmaceutical composition or compound release profile that conforms to a release rate over a specific period of time.

[0937] Synthetic: The term “synthetic” means produced, prepared, and/or manufactured by the hand of man. Synthesis of polynucleotides or other molecules of the present invention can be chemical or enzymatic.

[0938] Targeted Cells: As used herein, “targeted cells” refers to any one or more cells of interest. The cells can be found in vitro, in vivo, in situ or in the tissue or organ of an organism. The organism can be an animal, for example a mammal, a human, a subject or a patient.

[0939] Target tissue: As used herein “target tissue” refers to any one or more tissue types of interest in which the delivery of a polynucleotide would result in a desired biological and/or pharmacological effect. Examples of target tissues of interest include specific tissues, organs, and systems or groups thereof. In particular applications, a target tissue can be a liver, a kidney, a lung, a spleen, or a vascular endothelium in vessels (e.g., intra-coronary or intra-femoral). An “off-target tissue” refers to any one or more tissue types in which the expression of the encoded protein does not result in a desired biological and/or pharmacological effect.

[0940] The presence of a therapeutic agent in an off-target issue can be the result of: (i) leakage of a polynucleotide from the administration site to peripheral tissue or distant off-target tissue via diffusion or through the bloodstream (e.g., a polynucleotide intended to express a polypeptide in a certain tissue would reach the off-target tissue and the polypeptide would be expressed in the off-target tissue); or (ii) leakage of an polypeptide after administration of a polynucleotide encoding such polypeptide to peripheral tissue or distant off-target tissue via diffusion or through the bloodstream (e.g., a polynucleotide would expressed a polypeptide in the target tissue, and the polypeptide would diffuse to peripheral tissue).

[0941] Targeting sequence: As used herein, the phrase “targeting sequence” refers to a sequence that can direct the transport or localization of a protein or polypeptide.

[0942] Terminus: As used herein the terms “termini” or “terminus,” when referring to polypeptides, refers to an extremity of a peptide or polypeptide. Such extremity is not limited only to the first or final site of the peptide or polypeptide but can include additional amino acids in the terminal regions. The polypeptide based molecules of the invention can be characterized as having both an N-terminus (terminated by an amino acid with a free amino group (NH₂)) and a C-terminus (terminated by an amino acid with a free carboxyl group (COOH)). Proteins of the invention are in some cases made up of multiple polypeptide chains brought together by disulfide bonds or by non-covalent forces (multimers, oligomers). These sorts of proteins will have multiple N- and C-termini. Alternatively, the termini of the polypeptides can be modified such that they begin or end, as the case can be, with a non-polypeptide based moiety such as an organic conjugate.

[0943] Therapeutic Agent: The term “therapeutic agent” refers to an agent that, when administered to a subject, has a therapeutic, diagnostic, and/or prophylactic effect and/or elicits a desired biological and/or pharmacological effect. For example, in some embodiments, an mRNA encoding an ABCB4, ABCB11, or ATP8B1 polypeptide can be a therapeutic agent. In another example, in some embodiments, an mRNA encoding an ATP8B1 polypeptide can be a therapeutic agent. In yet another example, in some embodiments, an mRNA encoding an ABCB4 polypeptide, an mRNA encoding an ABCB11 polypeptide, and an mRNA encoding an ATP8B1 polypeptide can be, considered together, a therapeutic agent.

[0944] Therapeutically effective amount: As used herein, the term “therapeutically effective amount” means an amount of an agent to be delivered (e.g., nucleic acid, drug, therapeutic agent, diagnostic agent, prophylactic agent, etc.) that is sufficient, when administered to a subject suffering from or susceptible to an infection, disease, disorder, and/or condition, to treat, improve symptoms of, diagnose, prevent, and/or delay the onset of the infection, disease, disorder, and/or condition.

[0945] Therapeutically effective outcome: As used herein, the term “therapeutically effective outcome” means an outcome that is sufficient in a subject suffering from or susceptible to an infection, disease, disorder, and/or condition, to treat, improve symptoms of, diagnose, prevent, and/or delay the onset of the infection, disease, disorder, and/or condition.

[0946] Total daily dose: As used herein, a “total daily dose” is an amount given or prescribed in 24 hr. period. The total daily dose can be administered as a single unit dose or a split dose.

[0947] Transcription factor: As used herein, the term “transcription factor” refers to a DNA-binding protein that regulates transcription of DNA into RNA, for example, by activation or repression of transcription. Some transcription factors effect regulation of transcription alone, while others act in concert with other proteins. Some transcription factor can both activate and repress transcription under certain conditions. In general, transcription factors bind a specific target sequence or sequences highly similar to a specific consensus sequence in a regulatory region of a target gene. Transcription factors can regulate transcription of a target gene alone or in a complex with other molecules.

[0948] Transcription: As used herein, the term “transcription” refers to methods to produce mRNA (e.g., an mRNA sequence or template) from DNA (e.g., a DNA template or sequence)

[0949] Transfection: As used herein, “transfection” refers to the introduction of a polynucleotide (e.g., exogenous nucleic acids) into a cell wherein a polypeptide encoded by the polynucleotide is expressed (e.g., mRNA) or the polypeptide modulates a cellular function (e.g., siRNA, miRNA). As used herein, “expression” of a nucleic acid sequence refers to translation of a polynucleotide (e.g., an mRNA) into a polypeptide or protein and/or post-translational modification of a polypeptide or protein. Methods of transfection include, but are not limited to, chemical methods, physical treatments and cationic lipids or mixtures.

[0950] Treating, treatment, therapy: As used herein, the term “treating” or “treatment” or “therapy” refers to partially or completely alleviating, ameliorating, improving, relieving, delaying onset of, inhibiting progression of, reducing severity of, and/or reducing incidence of one or more symptoms or features of a disease, e.g., a PFIC. For example, “treating” a PFIC can refer to diminishing symptoms associate with the disease, prolong the lifespan (increase the survival rate) of patients, reducing the severity of the disease, preventing or delaying the onset of the disease, etc. Treatment can be administered to a subject who does not exhibit signs of a disease, disorder, and/or condition and/or to a subject who exhibits only early signs of a disease, disorder, and/or condition for the purpose of decreasing the risk of developing pathology associated with the disease, disorder, and/or condition.

[0951] Unmodified: As used herein, “unmodified” refers to any substance, compound or molecule prior to being changed in some way. Unmodified can, but does not always, refer to the wild type or native form of a biomolecule. Molecules can undergo a series of modifications whereby each modified molecule can serve as the “unmodified” starting molecule for a subsequent modification.

[0952] Uracil: Uracil is one of the four nucleobases in the nucleic acid of RNA, and it is represented by the letter U. Uracil can be attached to a ribose ring, or more specifically, a ribofuranose via a Ni-glycosidic bond to yield the nucleoside uridine. The nucleoside uridine is also commonly abbreviated according to the one letter code of its nucleobase, i.e., U. Thus, in the context of the present disclosure, when a monomer in a polynucleotide sequence is U, such U is designated interchangeably as a “uracil” or a “uridine.”

[0953] Uridine Content: The terms “uridine content” or “uracil content” are interchangeable and refer to the amount of uracil or uridine present in a certain nucleic acid sequence. Uridine content or uracil content can be expressed as an absolute value (total number of uridine or uracil in the sequence) or relative (uridine or uracil percentage respect to the total number of nucleobases in the nucleic acid sequence).

[0954] Uridine Modified Sequence: The terms “uridine-modified sequence” refers to a sequence optimized nucleic acid (e.g., a synthetic mRNA sequence) with a different overall or local uridine content (higher or lower uridine content) or with different uridine patterns (e.g., gradient distribution or clustering) with respect to the uridine content and/or uridine patterns of a candidate nucleic acid sequence. In the content of the present disclosure, the terms “uridine-modified sequence” and “uracil-modified sequence” are considered equivalent and interchangeable.

[0955] A “high uridine codon” is defined as a codon comprising two or three uridines, a “low uridine codon” is defined as a codon comprising one uridine, and a “no uridine codon” is a codon without any uridines. In some embodiments, a uridine-modified sequence comprises substitutions of high uridine codons with low uridine codons, substitutions of high uridine codons with no uridine codons, substitutions of low uridine codons with high uridine codons, substitutions of low uridine codons with no uridine codons, substitution of no uridine codons with low uridine codons, substitutions of no uridine codons with high uridine codons, and combinations thereof. In some embodiments, a high uridine codon can be replaced with another high uridine codon. In some embodiments, a low uridine codon can be replaced with another low uridine codon. In some embodiments, a no uridine codon can be replaced with another no uridine codon. A uridine-modified sequence can be uridine enriched or uridine rarefied.

[0956] Uridine Enriched: As used herein, the terms “uridine enriched” and grammatical variants refer to the increase in uridine content (expressed in absolute value or as a percentage value) in a sequence optimized nucleic acid (e.g., a synthetic mRNA sequence) with respect to the uridine content of the corresponding candidate nucleic acid sequence. Uridine enrichment can be implemented by substituting codons in the candidate nucleic acid sequence with synonymous codons containing less uridine nucleobases. Uridine enrichment can be global (i.e., relative to the entire length of a candidate nucleic acid sequence) or local (i.e., relative to a subsequence or region of a candidate nucleic acid sequence).

[0957] Uridine Rarefied: As used herein, the terms “uridine rarefied” and grammatical variants refer to a decrease in uridine content (expressed in absolute value or as a percentage value) in a sequence optimized nucleic acid (e.g., a synthetic mRNA sequence) with respect to the uridine content of the corresponding candidate nucleic acid sequence. Uridine rarefication can be implemented by substituting codons in the candidate nucleic acid sequence with synonymous codons containing less uridine nucleobases. Uridine rarefication can be global (i.e., relative to the entire length of a candidate nucleic acid sequence) or local (i.e., relative to a subsequence or region of a candidate nucleic acid sequence).

[0958] Variant: The term variant as used in present disclosure refers to both natural variants (e.g., polymorphisms, isoforms, etc) and artificial variants in which at least one amino acid residue in a native or starting sequence (e.g., a wild type sequence) has been removed and a different amino acid inserted in its place at the same position. These variants can be described as “substitutional variants.” The substitutions can be single, where only one amino acid in the molecule has been substituted, or they can be multiple, where two or more amino acids have been substituted in the same molecule. If amino acids are inserted or deleted, the resulting variant would be an “insertional variant” or a “deletional variant” respectively.

[0959] Initiation Codon: As used herein, the term “initiation codon”, used interchangeably with the term “start codon”, refers to the first codon of an open reading frame that is translated by the ribosome and is comprised of a triplet of linked adenine-uracil-guanine nucleobases. The initiation codon is depicted by the first letter codes of adenine (A), uracil (U), and guanine (G) and is often written simply as “AUG”. Although natural mRNAs may use codons other than AUG as the initiation codon, which are referred to herein as “alternative initiation codons”, the initiation codons of polynucleotides described herein use the AUG codon. During the process of translation initiation, the sequence comprising the initiation codon is recognized via complementary base-pairing to the anticodon of an initiator tRNA (Met-tRNAᵢ^{Met}) bound by the ribosome. Open reading frames may contain more than one AUG initiation codon, which are referred to herein as “alternate initiation codons”.

[0960] The initiation codon plays a critical role in translation initiation. The initiation codon is the first codon of an open reading frame that is translated by the ribosome. Typically, the initiation codon comprises the nucleotide triplet AUG, however, in some instances translation initiation can occur at other codons comprised of distinct nucleotides. The initiation of translation in eukaryotes is a multistep biochemical process that involves numerous protein-protein, protein-RNA, and RNA-RNA interactions between messenger RNA molecules (mRNAs), the 40S ribosomal subunit, other components of the translation machinery (e.g., eukaryotic initiation factors; elFs). The current model of mRNA translation initiation postulates that the pre-initiation complex (alternatively “43S pre-initiation complex”; abbreviated as “PIC”) translocates from the site of recruitment on the mRNA (typically the 5′ cap) to the initiation codon by scanning nucleotides in a 5′ to 3′ direction until the first AUG codon that resides within a specific translation-promotive nucleotide context (the Kozak sequence) is encountered (Kozak (1989) J Cell Biol 108:229-241). Scanning by the PIC ends upon complementary base-pairing between nucleotides comprising the anticodon of the initiator Met-tRNAᵢ^{Met} transfer RNA and nucleotides comprising the initiation codon of the mRNA. Productive base-pairing between the AUG codon and the Met-tRNAᵢ^{Met} anticodon elicits a series of structural and biochemical events that culminate in the joining of the large 60S ribosomal subunit to the PIC to form an active ribosome that is competent for translation elongation.

[0961] Kozak Sequence: The term “Kozak sequence” (also referred to as “Kozak consensus sequence”) refers to a translation initiation enhancer element to enhance expression of a gene or open reading frame, and which in eukaryotes, is located in the 5′ UTR. The Kozak consensus sequence was originally defined as the sequence GCCRCC, where R=a purine, following an analysis of the effects of single mutations surrounding the initiation codon (AUG) on translation of the preproinsulin gene (Kozak (1986) Cell 44:283-292). Polynucleotides disclosed herein comprise a Kozak consensus sequence, or a derivative or modification thereof. (Examples of translational enhancer compositions and methods of use thereof, see U.S. Pat. No. 5,807,707 to Andrews et al., incorporated herein by reference in its entirety; U.S. Pat. No. 5,723,332 to Chernajovsky, incorporated herein by reference in its entirety; U.S. Pat. No. 5,891,665 to Wilson, incorporated herein by reference in its entirety.)

[0962] Modified: As used herein “modified” or “modification” refers to a changed state or a change in composition or structure of a polynucleotide (e.g., mRNA). Polynucleotides may be modified in various ways including chemically, structurally, and/or functionally. For example, polynucleotides may be structurally modified by the incorporation of one or more RNA elements, wherein the RNA element comprises a sequence and/or an RNA secondary structure(s) that provides one or more functions (e.g., translational regulatory activity). Accordingly, polynucleotides of the disclosure may be comprised of one or more modifications (e.g., may include one or more chemical, structural, or functional modifications, including any combination thereof).

[0963] Nucleobase: As used herein, the term “nucleobase” (alternatively “nucleotide base” or “nitrogenous base”) refers to a purine or pyrimidine heterocyclic compound found in nucleic acids, including any derivatives or analogs of the naturally occurring purines and pyrimidines that confer improved properties (e.g., binding affinity, nuclease resistance, chemical stability) to a nucleic acid or a portion or segment thereof. Adenine, cytosine, guanine, thymine, and uracil are the nucleobases predominately found in natural nucleic acids. Other natural, non-natural, and/or synthetic nucleobases, as known in the art and/or described herein, can be incorporated into nucleic acids.

[0964] Nucleoside/Nucleotide: As used herein, the term “nucleoside” refers to a compound containing a sugar molecule (e.g., a ribose in RNA or a deoxyribose in DNA), or derivative or analog thereof, covalently linked to a nucleobase (e.g., a purine or pyrimidine), or a derivative or analog thereof (also referred to herein as “nucleobase”), but lacking an internucleoside linking group (e.g., a phosphate group). As used herein, the term “nucleotide” refers to a nucleoside covalently bonded to an internucleoside linking group (e.g., a phosphate group), or any derivative, analog, or modification thereof that confers improved chemical and/or functional properties (e.g., binding affinity, nuclease resistance, chemical stability) to a nucleic acid or a portion or segment thereof.

[0965] Nucleic acid: As used herein, the term “nucleic acid” is used in its broadest sense and encompasses any compound and/or substance that include a polymer of nucleotides, or derivatives or analogs thereof. These polymers are often referred to as “polynucleotides”. Accordingly, as used herein the terms “nucleic acid” and “polynucleotide” are equivalent and are used interchangeably. Exemplary nucleic acids or polynucleotides of the disclosure include, but are not limited to, ribonucleic acids (RNAs), deoxyribonucleic acids (DNAs), DNA-RNA hybrids, RNAi-inducing agents, RNAi agents, siRNAs, shRNAs, mRNAs, modified mRNAs, miRNAs, antisense RNAs, ribozymes, catalytic DNA, RNAs that induce triple helix formation, threose nucleic acids (TNAs), glycol nucleic acids (GNAs), peptide nucleic acids (PNAs), locked nucleic acids (LNAs, including LNA having a β-D-riboconfiguration, α-LNA having an α-L-ribo configuration (a diastereomer of LNA), 2′-amino-LNA having a 2′-amino functionalization, and 2′-amino-α-LNA having a 2′-amino functionalization) or hybrids thereof.

[0966] Nucleic Acid Structure: As used herein, the term “nucleic acid structure” (used interchangeably with “polynucleotide structure”) refers to the arrangement or organization of atoms, chemical constituents, elements, motifs, and/or sequence of linked nucleotides, or derivatives or analogs thereof, that comprise a nucleic acid (e.g., an mRNA). The term also refers to the two-dimensional or three-dimensional state of a nucleic acid. Accordingly, the term “RNA structure” refers to the arrangement or organization of atoms, chemical constituents, elements, motifs, and/or sequence of linked nucleotides, or derivatives or analogs thereof, comprising an RNA molecule (e.g., an mRNA) and/or refers to a two-dimensional and/or three dimensional state of an RNA molecule. Nucleic acid structure can be further demarcated into four organizational categories referred to herein as “molecular structure”, “primary structure”, “secondary structure”, and “tertiary structure” based on increasing organizational complexity.

[0967] Open Reading Frame: As used herein, the term “open reading frame”, abbreviated as “ORF”, refers to a segment or region of an mRNA molecule that encodes a polypeptide. The ORF comprises a continuous stretch of non-overlapping, in-frame codons, beginning with the initiation codon and ending with a stop codon, and is translated by the ribosome.

[0968] Pre Initiation Complex (PIC): As used herein, the term “pre-initiation complex” (alternatively “43S pre-initiation complex”; abbreviated as “PIC”) refers to a ribonucleoprotein complex comprising a 40S ribosomal subunit, eukaryotic initiation factors (eIF1, eIF1A, eIF3, eIF5), and the eIF2-GTP-Met-tRNAᵢ^{Met} ternary complex, that is intrinsically capable of attachment to the 5′ cap of an mRNA molecule and, after attachment, of performing ribosome scanning of the 5′ UTR.

[0969] RNA element: As used herein, the term “RNA element” refers to a portion, fragment, or segment of an RNA molecule that provides a biological function and/or has biological activity (e.g., translational regulatory activity). Modification of a polynucleotide by the incorporation of one or more RNA elements, such as those described herein, provides one or more desirable functional properties to the modified polynucleotide. RNA elements, as described herein, can be naturally-occurring, non-naturally occurring, synthetic, engineered, or any combination thereof. For example, naturally-occurring RNA elements that provide a regulatory activity include elements found throughout the transcriptomes of viruses, prokaryotic and eukaryotic organisms (e.g., humans). RNA elements in particular eukaryotic mRNAs and translated viral RNAs have been shown to be involved in mediating many functions in cells. Exemplary natural RNA elements include, but are not limited to, translation initiation elements (e.g., internal ribosome entry site (IRES), see Kieft et al., (2001) RNA 7(2):194-206), translation enhancer elements (e.g., the APP mRNA translation enhancer element, see Rogers et al., (1999) J Biol Chem 274(10):6421-6431), mRNA stability elements (e.g., AU-rich elements (AREs), see Garneau et al., (2007) Nat Rev Mol Cell Biol 8(2):113-126), translational repression element (see e.g., Blumer et al., (2002) Mech Dev 110(1-2):97-112), protein-binding RNA elements (e.g., iron-responsive element, see Selezneva et al., (2013) J Mol Biol 425(18):3301-3310), cytoplasmic polyadenylation elements (Villalba et al., (2011) Curr Opin Genet Dev 21(4):452-457), and catalytic RNA elements (e.g., ribozymes, see Scott et al., (2009) Biochim Biophys Acta 1789(9-10):634-641).

[0970] Residence time: As used herein, the term “residence time” refers to the time of occupancy of a pre-initiation complex (PIC) or a ribosome at a discrete position or location along an mRNA molecule.

[0971] Translational Regulatory Activity: As used herein, the term “translational regulatory activity” (used interchangeably with “translational regulatory function”) refers to a biological function, mechanism, or process that modulates (e.g., regulates, influences, controls, varies) the activity of the translational apparatus, including the activity of the PIC and/or ribosome. In some aspects, the desired translation regulatory activity promotes and/or enhances the translational fidelity of mRNA translation. In some aspects, the desired translational regulatory activity reduces and/or inhibits leaky scanning.

### Equivalents and Scope

[0972] Those skilled in the art will recognize, or be able to ascertain using no more than routine experimentation, many equivalents to the specific embodiments in accordance with the invention described herein. The scope of the present invention is not intended to be limited to the above Description, but rather is as set forth in the appended claims.

[0973] In the claims, articles such as “a,” “an,” and “the” can mean one or more than one unless indicated to the contrary or otherwise evident from the context. Claims or descriptions that include “or” between one or more members of a group are considered satisfied if one, more than one, or all of the group members are present in, employed in, or otherwise relevant to a given product or process unless indicated to the contrary or otherwise evident from the context. The invention includes embodiments in which exactly one member of the group is present in, employed in, or otherwise relevant to a given product or process. The invention includes embodiments in which more than one, or all of the group members are present in, employed in, or otherwise relevant to a given product or process.

[0974] It is also noted that the term “comprising” is intended to be open and permits but does not require the inclusion of additional elements or steps. When the term “comprising” is used herein, the term “consisting of” is thus also encompassed and disclosed.

[0975] Where ranges are given, endpoints are included. Furthermore, it is to be understood that unless otherwise indicated or otherwise evident from the context and understanding of one of ordinary skill in the art, values that are expressed as ranges can assume any specific value or subrange within the stated ranges in different embodiments of the invention, to the tenth of the unit of the lower limit of the range, unless the context clearly dictates otherwise.

[0976] In addition, it is to be understood that any particular embodiment of the present invention that falls within the prior art can be explicitly excluded from any one or more of the claims. Since such embodiments are deemed to be known to one of ordinary skill in the art, they can be excluded even if the exclusion is not set forth explicitly herein. Any particular embodiment of the compositions of the invention (e.g., any nucleic acid or protein encoded thereby; any method of production; any method of use; etc.) can be excluded from any one or more claims, for any reason, whether or not related to the existence of prior art.

[0977] All cited sources, for example, references, publications, databases, database entries, and art cited herein, are incorporated into this application by reference, even if not expressly stated in the citation. In case of conflicting statements of a cited source and the instant application, the statement in the instant application shall control.

[0978] Section and table headings are not intended to be limiting.

### Exemplary Sequences

[0979] It should be understood that any of the mRNA sequences described herein may include a 5′ UTR and/or a 3′ UTR. The UTR sequences may be selected from the following sequences, or other known UTR sequences may be used. It should also be understood that any of the mRNA constructs described herein may further comprise a poly-A tail and/or cap (e.g., 7mG(5′)ppp(5′)NlmpNp). Further, while many of the mRNAs and encoded antigen sequences described herein include a signal peptide and/or a peptide tag (e.g., C-terminal His tag), it should be understood that the indicated signal peptide and/or peptide tag may be substituted for a different signal peptide and/or peptide tag, or the signal peptide and/or peptide tag may be omitted.

Exemplary mRNA Constructs with Corresponding Amino Acid Sequence

| | | |
|---|---|---|
| | | SEQ ID |
| Name | Sequence | NO: |

SEQ ID NO: 118 includes, from 5′ to 3′, 5′ UTR (SEQ ID NO: 12),
ORF (SEQ ID NO: 284), 3′ UTR (SEQ ID NO: 13)

| | | |
|---|---|---|
| 5′-UTR | GGGAAAUAAGAGAGAAAAGAAGAGUAAGAAGAAAUAUAAGAGCCACC | 12 |
| ORF | AUGGAUCUUGAGGCGGCAAAGAACGGAACAGCCUGGCGCCCCACGAGCGCGGAGGGCGACU | 284 |
| (excluding | UUGAACUGGGCAUCAGCAGCAAACAAAAAAGGAAAAAAACGAAGACAGUGAAAAUGAUUGG | |
| the stop | AGUAUUAACAUUGUUUCGAUACUCCGAUUGGCAGGAUAAAUUGUUUAUGUCGCUGGGUACC | |
| codon) | AUCAUGGCCAUAGCUCACGGAUCAGGUCUCCCCCUCAUGAUGAUAGUAUUUGGAGAGAUGA | |
| | CUGACAAAUUUGUUGAUACUGCAGGAAACUUCUCCUUUCCAGUGAACUUUUCCUUGUCGCU | |
| | GCUAAAUCCAGGCAAAAUUCUGGAAGAAGAAAUGACUAGAUAUGCAUAUUACUACUCAGGA | |
| | UUGGGUGCUGGAGUUCUUGUUGCUGCCUAUAUACAAGUUUCAUUUUGGACUUUGGCAGCUG | |
| | GUCGACAGAUCAGGAAAAUUAGGCAGAAGUUUUUUCAUGCUAUUCUACGACAGGAAAUAGG | |
| | AUGGUUUGACAUCAACGACACCACUGAACUCAAUACGCGGCUAACAGAUGACAUCUCCAAA | |
| | AUCAGUGAAGGAAUUGGUGACAAGGUUGGAAUGUUCUUUCAAGCAGUAGCCACGUUUUUUG | |
| | CAGGAUUCAUAGUGGGAUUCAUCAGAGGAUGGAAGCUCACCCUUGUGAUAAUGGCCAUCAG | |
| | CCCUAUUCUAGGACUCUCUGCAGCCGUUUGGGCAAAGAUACUCUCGGCAUUUAGUGACAAA | |
| | GAACUAGCUGCUUAUGCAAAAGCAGGCGCCGUGGCAGAAGAGGCUCUGGGGGCCAUCAGGA | |
| | CUGUGAUAGCUUUCGGGGGCCAGAACAAAGAGCUGGAAAGGUAUCAGAAACAUUUAGAAAA | |
| | UGCCAAAGAGAUUGGAAUUAAAAAAGCUAUUUCAGCAAACAUUUCCAUGGGUAUUGCCUUC | |
| | CUGUUAAUAUAUGCAUCAUAUGCACUGGCCUUCUGGUAUGGAUCCACUCUAGUCAUAUCAA | |
| | AAGAAUAUACUAUUGGAAAUGCAAUGACAGUUUUUUUUUCAAUCCUAAUUGGAGCUUUCAG | |
| | UGUUGGCCAGGCUGCCCCAUGUAUUGAUGCUUUUGCCAAUGCAAGAGGAGCAGCAUAUGUG | |
| | AUCUUUGAUAUUAUUGAUAAUAAUCCUAAAAUUGACAGUUUUUCAGAGAGAGGACACAAAC | |
| | CAGACAGCAUCAAAGGGAAUUUGGAGUUCAAUGAUGUUCACUUUUCUUACCCUUCUCGAGC | |
| | UAACGUCAAGAUCUUGAAGGGCCUCAACCUGAAGGUGCAGAGUGGGCAGACGGUGGCCCUG | |
| | GUUGGAAGUAGUGGCUGUGGGAAGAGCACAACGGUCCAGCUGAUACAGAGGCUCUAUGACC | |
| | CUGAUGAGGGCACAAUUAACAUUGAUGGGCAGGAUAUUAGGAACUUUAAUGUAAACUAUCU | |
| | GAGGGAAAUCAUUGGUGUGGUGAGUCAGGAGCCGGUGCUGUUUUCCACCACAAUUGCUGAA | |
| | AAUAUUUGUUAUGGCCGUGGAAAUGUAACCAUGGAUGAGAUAAAGAAAGCUGUCAAAGAGG | |
| | CCAACGCCUAUGAGUUUAUCAUGAAAUUACCACAGAAAUUUGACACCCUGGUUGGAGAGAG | |
| | AGGGGCCCAGCUGAGUGGUGGGCAGAAGCAGAGGAUCGCCAUUGCACGUGCCCUGGUUCGC | |
| | AACCCCAAGAUCCUUCUGCUGGAUGAGGCCACGUCAGCAUUGGACACAGAAAGUGAAGCUG | |
| | AGGUACAGGCAGCUCUGGAUAAGGCCAGAGAAGGCCGGACCACCAUUGUGAUAGCACACCG | |
| | ACUGUCUACGGUCCGAAAUGCAGAUGUCAUCGCUGGGUUUGAGGAUGGAGUAAUUGUGGAG | |
| | CAAGGAAGCCACAGCGAACUGAUGAAGAAGGAAGGGGUGUACUUCAAACUUGUCAACAUGC | |
| | AGACAUCAGGAAGCCAGAUCCAGUCAGAAGAAUUUGAACUAAAUGAUGAAAAGGCUGCCAC | |
| | UAGAAUGGCCCCAAAUGGCUGGAAAUCUCGCCUAUUUAGGCAUUCUACUCAGAAAAACCUU | |
| | AAAAAUUCACAAAUGUGUCAGAAGAGCCUUGAUGUGGAAACCGAUGGACUUGAAGCAAAUG | |
| | UGCCACCAGUGUCCUUUCUGAAGGUCCUGAAACUGAAUAAAACAGAAUGGCCCUACUUUGU | |
| | CGUGGGAACAGUAUGUGCCAUUGCCAAUGGGGGGCUUCAGCCGGCAUUUUCAGUCAUAUUC | |
| | UCAGAGAUCAUAGCGAUUUUUGGACCAGGCGAUGAUGCAGUGAAGCAGCAGAAGUGCAACA | |
| | UAUUCUCUUUGAUUUUCUUAUUUCUGGGAAUUAUUUCUUUUUUUACUUUCUUCCUUCAGGG | |
| | UUUCACGUUUGGGAAAGCUGGCGAGAUCCUCACCAGAAGACUGCGGUCAAUGGCUUUUAAA | |
| | GCAAUGCUAAGACAGGACAUGAGCUGGUUUGAUGACCAUAAAAACAGUACUGGUGCACUUU | |
| | CUACAAGACUUGCCACAGAUGCUGCCCAAGUCCAAGGAGCCACAGGAACCAGGUUGGCUUU | |
| | AAUUGCACAGAAUAUAGCUAACCUUGGAACUGGUAUUAUCAUAUCAUUUAUCUACGGUUGG | |
| | CAGUUAACCCUAUUGCUAUUAGCAGUUGUUCCAAUUAUUGCUGUGUCAGGAAUUGUUGAAA | |
| | UGAAAUUGUUGGCUGGAAAUGCCAAAAGAGAUAAAAAAGAACUGGAAGCUGCUGGAAAGAU | |
| | UGCAACAGAGGCAAUAGAAAAUAUUAGGACAGUUGUGUCUUUGACCCAGGAAAGAAAAUUU | |
| | GAAUCAAUGUAUGUUGAAAAAUUGUAUGGACCUUACAGGAAUUCUGUGCAGAAGGCACACA | |
| | UCUAUGGAAUUACUUUUAGUAUCUCACAAGCAUUUAUGUAUUUUUCCUAUGCCGGUUGUUU | |
| | UCGAUUUGGUGCAUAUCUCAUUGUGAAUGGACAUAUGCGCUUCAGAGAUGUUAUUCUGGUG | |
| | UUUUCUGCAAUUGUAUUUGGUGCAGUGGCUCUAGGACAUGCCAGUUCAUUUGCUCCAGACU | |
| | AUGCUAAAGCUAAGCUGUCUGCAGCCCACUUAUUCAUGCUGUUUGAAAGACAACCUCUGAU | |
| | UGACAGCUACAGUGAAGAGGGGCUGAAGCCUGAUAAAUUUGAAGGAAAUAUAACAUUUAAU | |
| | GAAGUCGUGUUCAACUAUCCCACCCGAGCAAACGUGCCAGUGCUUCAGGGGCUGAGCCUGG | |
| | AGGUGAAGAAAGGCCAGACACUAGCCCUGGUGGGCAGCAGUGGCUGUGGGAAGAGCACGGU | |
| | GGUCCAGCUCCUGGAGCGGUUCUACGACCCCUUGGCGGGGACAGUGUUUGUGGACUUUGGU | |
| | UUUCAGCUUCUCGAUGGUCAAGAAGCAAAGAAACUCAAUGUCCAGUGGCUCAGAGCUCAAC | |
| | UCGGAAUCGUGUCUCAGGAGCCUAUCCUAUUUGACUGCAGCAUUGCCGAGAAUAUUGCCUA | |
| | UGGAGACAACAGCCGGGUUGUAUCACAGGAUGAAAUUGUGAGUGCAGCCAAAGCUGCCAAC | |
| | AUACAUCCUUUCAUCGAGACGUUACCCCACAAAUAUGAAACAAGAGUGGGAGAUAAGGGGA | |
| | CUCAGCUCUCAGGAGGUCAAAAACAGAGGAUUGCUAUUGCCCGAGCCCUCAUCAGACAACC | |
| | UCAAAUCCUCCUGUUGGAUGAAGCUACAUCAGCUCUGGAUACUGAAAGUGAAAAGGUUGUC | |
| | CAAGAAGCCCUGGACAAAGCCAGAGAAGGCCGCACCUGCAUUGUGAUUGCUCACCGCCUGU | |
| | CCACCAUCCAGAAUGCAGACUUAAUAGUGGUGUUUCAGAAUGGGAGAGUCAAGGAGCAUGG | |
| | CACGCAUCAGCAGCUGCUGGCACAGAAAGGCAUCUAUUUUUCAAUGGUCAGUGUCCAGGCU | |
| | GGGACACAGAACUUA | |
| 3′ UTR | UGAUAAUAGGCUGGAGCCUCGGUGGCCAUGCUUCUUGCCCCUUGGGCCUCCCCCCAGCCCC | 13 |
| | UCCUCCCCUUCCUGCACCCGUACCCCCGUGGUCUUUGAAUAAAGUCUGAGUGGGCGGC | |
| ELP- | MDLEAAKNGTAWRPTSAEGDFELGISSKQKRKKTKTVKMIGVLTLFRYSDWQDKLFMSLGT | 119 |
| hABCB4- | IMAIAHGSGLPLMMIVFGEMTDKFVDTAGNFSFPVNFSLSLLNPGKILEEEMTRYAYYYSG | |
| 01-001 - | LGAGVLVAAYIQVSFWTLAAGRQIRK1RQKFFHAILRQEIGWFDINDTTELNTRLTDDISK | |
| amino acid | ISEGIGDKVGMFFQAVATFFAGFIVGFIRGWKLTLVIMAISPILGLSAAVWAKILSAFSDK | |
| | ELAAYAKAGAVAEEALGAIRTVIAFGGQNKELERYQKHLENAKEIGIKKAISANISMGIAF | |
| | LLIYASYALAFWYGSTLVISKEYTIGNAMTVFFSILIGAFSVGQAAPCIDAFANARGAAYV | |
| | IFDIIDNNPKIDSFSERGHKPDS1KGNLEFNDVHFSYPSRANVKILKGLNLKVQSGQTVAL | |
| | VGSSGCGKSTTVQLIQRLYDPDEGTINIDGQDIRNFNVNYLREIIGVVSQEPVLFSTTIAE | |
| | NICYGRGNVTMDEIKKAVKEANAYEFIMKLPQKFDTLVGERGAQLSGGQKQRIAIARALVR | |
| | NPKILLLDEATSALDTESEAEVQAALDKAREGRTTIVIAHRLSTVRNADVIAGFEDGVIVE | |
| | QGSHSELMKKEGVYFKLVNMQTSGSQIQSEEFELNDEKAATRMAPNGWKSRLFRHSTQKNL | |
| | KNSQMCQKSLDVETDGLEANVPPVSFLKVLKLNKTEWPYFVVGTVCAIANGGLQPAFSVIE | |
| | SEIIAIFGPGDDAVKQQKCNIFSLIFLFLGIISFFTFFLQGFTFGKAGEILTRRLRSMAFK | |
| | AMLRQDMSWFDDHKNSTGALSTRLATDAAQVQGATGTRLALIAQNIANLGTGIIISFIYGW | |
| | QLTLLLLAVVPIIAVSGIVEMKLLAGNAKRDKKELEAAGKIATEAIEN1RTVVSLTQERKF | |
| | ESMYVEKLYGPYRNSVQKAHIYGITFSISQAFMYFSYAGCFRFGAYLIVNGHMRFRDVILV | |
| | FSAIVFGAVALGHASSFAPDYAKAKLSAAHLFMLFERQPLIDSYSEEGLKPDKFEGNITFN | |
| | EVVFNYPTRANVPVLQGLSLEVKKGQTLALVGSSGCGKSTVVQLLERFYDPLAGTVFVDFG | |
| | FQLLDGQEAKKLNVQWLRAQLGIVSQEPILFDCSIAENIAYGDNSRVVSQDEIVSAAKAAN | |
| | IETPFIETLPHKYETRVGDKGTQLSGGQKQRIAIARALIRQPQILLLDEATSALDTESEKV | |
| | VQEALDKAREGRTCIVIAHRLSTIQNADLIVVFQNGRVKEHGTHQQLLAQKGIYFSMVSVQ | |
| | AGTQNL | |

SEQ ID NO: 120 includes, from 5′ to 3′, 5′ UTR (SEQ ID NO: 12),
ORF (SEQ ID NO: 285), 3′ UTR (SEQ ID NO: 13)

| | | |
|---|---|---|
| 5′ UTR | GGGAAAUAAGAGAGAAAAGAAGAGUAAGAAGAAAUAUAAGAGCCACC | 12 |
| ORF | AUGGAUCUUGAGGCGGCAAAGAACGGAACAGCCUGGCGCCCCACGAGCGCGGAGGGCGACU | 285 |
| (excluding | UUGAACUGGGCAUCAGCAGCAAACAAAAAAGGAAAAAAACGAAGACAGUGAAAAUGAUUGG | |
| the stop | AGUAUUAACAUUGUUUCGAUACUCCGAUUGGCAGGAUAAAUUGUUUAUGUCGCUGGGUACC | |
| codon) | AUCAUGGCCAUAGCUCACGGAUCAGGUCUCCCCCUCAUGAUGAUAGUAUUUGGAGAGAUGA | |
| | CUGACAAAUUUGUUGAUACUGCAGGAAACUUCUCCUUUCCAGUGAACUUUUCCUUGUCGCU | |
| | GCUAAAUCCAGGCAAAAUUCUGGAAGAAGAAAUGACUAGAUAUGCAUAUUACUACUCAGGA | |
| | UUGGGUGCUGGAGUUCUUGUUGCUGCCUAUAUACAAGUUUCAUUUUGGACUUUGGCAGCUG | |
| | GUCGACAGAUCAGGAAAAUUAGGCAGAAGUUUUUUCAUGCUAUUCUACGACAGGAAAUAGG | |
| | AUGGUUUGACAUCAACGACACCACUGAACUCAAUACGCGGCUAACAGAUGACAUCUCCAAA | |
| | AUCAGUGAAGGAAUUGGUGACAAGGUUGGAAUGUUCUUUCAAGCAGUAGCCACGUUUUUUG | |
| | CAGGAUUCAUAGUGGGAUUCAUCAGAGGAUGGAAGCUCACCCUUGUGAUAAUGGCCAUCAG | |
| | CCCUAUUCUAGGACUCUCUGCAGCCGUUUGGGCAAAGAUACUCUCGGCAUUUAGUGACAAA | |
| | GAACUAGCUGCUUAUGCAAAAGCAGGCGCCGUGGCAGAAGAGGCUCUGGGGGCCAUCAGGA | |
| | CUGUGAUAGCUUUCGGGGGCCAGAACAAAGAGCUGGAAAGGUAUCAGAAACAUUUAGAAAA | |
| | UGCCAAAGAGAUUGGAAUUAAAAAAGCUAUUUCAGCAAACAUUUCCAUGGGUAUUGCCUUC | |
| | CUGUUAAUAUAUGCAUCAUAUGCACUGGCCUUCUGGUAUGGAUCCACUCUAGUCAUAUCAA | |
| | AAGAAUAUACUAUUGGAAAUGCAAUGACAGUUUUUUUUUCAAUCCUAAUUGGAGCUUUCAG | |
| | UGUUGGCCAGGCUGCCCCAUGUAUUGAUGCUUUUGCCAAUGCAAGAGGAGCAGCAUAUGUG | |
| | AUCUUUGAUAUUAUUGAUAAUAAUCCUAAAAUUGACAGUUUUUCAGAGAGAGGACACAAAC | |
| | CAGACAGCAUCAAAGGGAAUUUGGAGUUCAAUGAUGUUCACUUUUCUUACCCUUCUCGAGC | |
| | UAACGUCAAGAUCUUGAAGGGCCUCAACCUGAAGGUGCAGAGUGGGCAGACGGUGGCCCUG | |
| | GUUGGAAGUAGUGGCUGUGGGAAGAGCACAACGGUCCAGCUGAUACAGAGGCUCUAUGACC | |
| | CUGAUGAGGGCACAAUUAACAUUGAUGGGCAGGAUAUUAGGAACUUUAAUGUAAACUAUCU | |
| | GAGGGAAAUCAUUGGUGUGGUGAGUCAGGAGCCGGUGCUGUUUUCCACCACAAUUGCUGAA | |
| | AAUAUUUGUUAUGGCCGUGGAAAUGUAACCAUGGAUGAGAUAAAGAAAGCUGUCAAAGAGG | |
| | CCAACGCCUAUGAGUUUAUCAUGAAAUUACCACAGAAAUUUGACACCCUGGUUGGAGAGAG | |
| | AGGGGCCCAGCUGAGUGGUGGGCAGAAGCAGAGGAUCGCCAUUGCACGUGCCCUGGUUCGC | |
| | AACCCCAAGAUCCUUCUGCUGGAUGAGGCCACGUCAGCAUUGGACACAGAAAGUGAAGCUG | |
| | AGGUACAGGCAGCUCUGGAUAAGGCCAGAGAAGGCCGGACCACCAUUGUGAUAGCACACCG | |
| | ACUGUCUACGGUCCGAAAUGCAGAUGUCAUCGCUGGGUUUGAGGAUGGAGUAAUUGUGGAG | |
| | CAAGGAAGCCACAGCGAACUGAUGAAGAAGGAAGGGGUGUACUUCAAACUUGUCAACAUGC | |
| | AGACAUCAGGAAGCCAGAUCCAGUCAGAAGAAUUUGAACUAAAUGAUGAAAAGGCUGCCAC | |
| | UAGAAUGGCCCCAAAUGGCUGGAAAUCUCGCCUAUUUAGGCAUUCUACUCAGAAAAACCUU | |
| | AAAAAUUCACAAAUGUGUCAGAAGAGCCUUGAUGUGGAAACCGAUGGACUUGAAGCAAAUG | |
| | UGCCACCAGUGUCCUUUCUGAAGGUCCUGAAACUGAAUAAAACAGAAUGGCCCUACUUUGU | |
| | CGUGGGAACAGUAUGUGCCAUUGCCAAUGGGGGGCUUCAGCCGGCAUUUUCAGUCAUAUUC | |
| | UCAGAGAUCAUAGCGAUUUUUGGACCAGGCGAUGAUGCAGUGAAGCAGCAGAAGUGCAACA | |
| | UAUUCUCUUUGAUUUUCUUAUUUCUGGGAAUUAUUUCUUUUUUUACUUUCUUCCUUCAGGG | |
| | UUUCACGUUUGGGAAAGCUGGCGAGAUCCUCACCAGAAGACUGCGGUCAAUGGCUUUUAAA | |
| | GCAAUGCUAAGACAGGACAUGAGCUGGUUUGAUGACCAUAAAAACAGUACUGGUGCACUUU | |
| | CUACAAGACUUGCCACAGAUGCUGCCCAAGUCCAAGGAGCCACAGGAACCAGGUUGGCUUU | |
| | AAUUGCACAGAAUAUAGCUAACCUUGGAACUGGUAUUAUCAUAUCAUUUAUCUACGGUUGG | |
| | CAGUUAACCCUAUUGCUAUUAGCAGUUGUUCCAAUUAUUGCUGUGUCAGGAAUUGUUGAAA | |
| | UGAAAUUGUUGGCUGGAAAUGCCAAAAGAGAUAAAAAAGAACUGGAAGCUGCUGGAAAGAU | |
| | UGCAACAGAGGCAAUAGAAAAUAUUAGGACAGUUGUGUCUUUGACCCAGGAAAGAAAAUUU | |
| | GAAUCAAUGUAUGUUGAAAAAUUGUAUGGACCUUACAGGAAUUCUGUGCAGAAGGCACACA | |
| | UCUAUGGAAUUACUUUUAGUAUCUCACAAGCAUUUAUGUAUUUUUCCUAUGCCGGUUGUUU | |
| | UCGAUUUGGUGCAUAUCUCAUUGUGAAUGGACAUAUGCGCUUCAGAGAUGUUAUUCUGGUG | |
| | UUUUCUGCAAUUGUAUUUGGUGCAGUGGCUCUAGGACAUGCCAGUUCAUUUGCUCCAGACU | |
| | AUGCUAAAGCUAAGCUGUCUGCAGCCCACUUAUUCAUGCUGUUUGAAAGACAACCUCUGAU | |
| | UGACAGCUACAGUGAAGAGGGGCUGAAGCCUGAUAAAUUUGAAGGAAAUAUAACAUUUAAU | |
| | GAAGUCGUGUUCAACUAUCCCACCCGAGCAAACGUGCCAGUGCUUCAGGGGCUGAGCCUGG | |
| | AGGUGAAGAAAGGCCAGACACUAGCCCUGGUGGGCAGCAGUGGCUGUGGGAAGAGCACGGU | |
| | GGUCCAGCUCCUGGAGCGGUUCUACGACCCCUUGGCGGGGACAGUGUUUGUGGACUUUGGU | |
| | UUUCAGCUUCUCGAUGGUCAAGAAGCAAAGAAACUCAAUGUCCAGUGGCUCAGAGCUCAAC | |
| | UCGGAAUCGUGUCUCAGGAGCCUAUCCUAUUUGACUGCAGCAUUGCCGAGAAUAUUGCCUA | |
| | UGGAGACAACAGCCGGGUUGUAUCACAGGAUGAAAUUGUGAGUGCAGCCAAAGCUGCCAAC | |
| | AUACAUCCUUUCAUCGAGACGUUACCCCACAAAUAUGAAACAAGAGUGGGAGAUAAGGGGA | |
| | CUCAGCUCUCAGGAGGUCAAAAACAGAGGAUUGCUAUUGCCCGAGCCCUCAUCAGACAACC | |
| | UCAAAUCCUCCUGUUGGAUGAAGCUACAUCAGCUCUGGAUACUGAAAGUGAAAAGGUUGUC | |
| | CAAGAAGCCCUGGACAAAGCCAGAGAAGGCCGCACCUGCAUUGUGAUUGCUCACCGCCUGU | |
| | CCACCAUCCAGAAUGCAGACUUAAUAGUGGUGUUUCAGAAUGGGAGAGUCAAGGAGCAUGG | |
| | CACGCAUCAGCAGCUGCUGGCACAGAAAGGCAUCUAUUUUUCAAUGGUCAGUGUCCAGGCU | |
| | GGGACACAGAACUUAGAUUACAAGGAUGACGACGAUAAG | |
| 3′ UTR | UGAUAAUAGGCUGGAGCCUCGGUGGCCAUGCUUCUUGCCCCUUGGGCCUCCCCCCAGCCCC | 13 |
| | UCCUCCCCUUCCUGCACCCGUACCCCCGUGGUCUUUGAAUAAAGUCUGAGUGGGCGGC | |
| ELP- | MDLEAAKNGTAWRPTSAEGDFELGISSKQKRKKTKTVKMIGVLTLFRYSDWQDKLFMSLGT | 121 |
| hABCB4- | IMAIAHGSGLPLMMIVFGEMTDKFVDTAGNFSFPVNFSLSLLNPGKILEEEMTRYAYYYSG | |
| 02-001- | LGAGVLVAAYIQVSFWTLAAGRQIRK1RQKFFHAILRQEIGWFDINDTTELNTRLTDDISK | |
| amino acid | ISEGIGDKVGMFFQAVATFFAGFIVGFIRGWKLTLVIMAISPILGLSAAVWAKILSAFSDK | |
| | ELAAYAKAGAVAEEALGAIRTVIAFGGQNKELERYQKHLENAKEIGIKKAISANISMGIAF | |
| | LLIYASYALAFWYGSTLVISKEYTIGNAMTVFFSILIGAFSVGQAAPCIDAFANARGAAYV | |
| | IFDIIDNNPKIDSFSERGHKPDS1KGNLEFNDVHFSYPSRANVKILKGLNLKVQSGQTVAL | |
| | VGSSGCGKSTTVQLIQRLYDPDEGTINIDGQDIRNFNVNYLREIIGVVSQEPVLFSTTIAE | |
| | NICYGRGNVTMDEIKKAVKEANAYEFIMKLPQKFDTLVGERGAQLSGGQKQRIAIARALVR | |
| | NPKILLLDEATSALDTESEAEVQAALDKAREGRTTIVIAHRLSTVRNADVIAGFEDGVIVE | |
| | QGSHSELMKKEGVYFKLVNMQTSGSQIQSEEFELNDEKAATRMAPNGWKSRLFRHSTQKNL | |
| | KNSQMCQKSLDVETDGLEANVPPVSFLKVLKLNKTEWPYFVVGTVCAIANGGLQPAFSVIE | |
| | SEIIAIFGPGDDAVKQQKCNIFSLIFLFLGIISFFTFFLQGFTFGKAGEILTRRLRSMAFK | |
| | AMLRQDMSWFDDHKNSTGALSTRLATDAAQVQGATGTRLALIAQNIANLGTGIIISFIYGW | |
| | QLTLLLLAVVPIIAVSGIVEMKLLAGNAKRDKKELEAAGKIATEAIEN1RTVVSLTQERKF | |
| | ESMYVEKLYGPYRNSVQKAHIYGITFSISQAFMYFSYAGCFRFGAYLIVNGHMRFRDVILV | |
| | FSAIVFGAVALGHASSFAPDYAKAKLSAAHLFMLFERQPLIDSYSEEGLKPDKFEGNITFN | |
| | EVVFNYPTRANVPVLQGLSLEVKKGQTLALVGSSGCGKSTVVQLLERFYDPLAGTVFVDFG | |
| | FQLLDGQEAKKLNVQWLRAQLGIVSQEPILFDCSIAENIAYGDNSRVVSQDEIVSAAKAAN | |
| | IETPFIETLPHKYETRVGDKGTQLSGGQKQRIAIARALIRQPQILLLDEATSALDTESEKV | |
| | VQEALDKAREGRTCIVIAHRLSTIQNADLIVVFQNGRVKEHGTHQQLLAQKGIYFSMVSVQ | |
| | AGTQNLDYKDDDDK | |

SEQ ID NO: 122 includes, from 5′ to 3′, 5′ UTR (SEQ ID NO: 12),
ORF (SEQ ID NO: 286), 3′ UTR (SEQ ID NO: 13)

| | | |
|---|---|---|
| 5′ UTR | GGGAAAUAAGAGAGAAAAGAAGAGUAAGAAGAAAUAUAAGAGCCACC | 12 |
| ORF | AUGGAUCUUGAGGCGGCAAAGAACGGAACAGCCUGGCGCCCCACGAGCGCGGAGGGCGACU | 286 |
| (excluding | UUGAACUGGGCAUCAGCAGCAAACAAAAAAGGAAAAAAACGAAGACAGUGAAAAUGAUUGG | |
| the stop | AGUAUUAACAUUGUUUCGAUACUCCGAUUGGCAGGAUAAAUUGUUUAUGUCGCUGGGUACC | |
| codon) | AUCAUGGCCAUAGCUCACGGAUCAGGUCUCCCCCUCAUGAUGAUAGUAUUUGGAGAGAUGA | |
| | CUGACAAAUUUGUUGAUACUGCAGGAAACUUCUCCUUUCCAGUGAACUUUUCCUUGUCGCU | |
| | GCUAAAUCCAGGCAAAAUUCUGGAAGAAGAAAUGACUAGAUAUGCAUAUUACUACUCAGGA | |
| | UUGGGUGCUGGAGUUCUUGUUGCUGCCUAUAUACAAGUUUCAUUUUGGACUUUGGCAGCUG | |
| | GUCGACAGAUCAGGAAAAUUAGGCAGAAGUUUUUUCAUGCUAUUCUACGACAGGAAAUAGG | |
| | AUGGUUUGACAUCAACGACACCACUGAACUCAAUACGCGGCUAACAGAUGACAUCUCCAAA | |
| | AUCAGUGAAGGAAUUGGUGACAAGGUUGGAAUGUUCUUUCAAGCAGUAGCCACGUUUUUUG | |
| | CAGGAUUCAUAGUGGGAUUCAUCAGAGGAUGGAAGCUCACCCUUGUGAUAAUGGCCAUCAG | |
| | CCCUAUUCUAGGACUCUCUGCAGCCGUUUGGGCAAAGAUACUCUCGGCAUUUAGUGACAAA | |
| | GAACUAGCUGCUUAUGCAAAAGCAGGCGCCGUGGCAGAAGAGGCUCUGGGGGCCAUCAGGA | |
| | CUGUGAUAGCUUUCGGGGGCCAGAACAAAGAGCUGGAAAGGUAUCAGAAACAUUUAGAAAA | |
| | UGCCAAAGAGAUUGGAAUUAAAAAAGCUAUUUCAGCAAACAUUUCCAUGGGUAUUGCCUUC | |
| | CUGUUAAUAUAUGCAUCAUAUGCACUGGCCUUCUGGUAUGGAUCCACUCUAGUCAUAUCAA | |
| | AAGAAUAUACUAUUGGAAAUGCAAUGACAGUUUUUUUUUCAAUCCUAAUUGGAGCUUUCAG | |
| | UGUUGGCCAGGCUGCCCCAUGUAUUGAUGCUUUUGCCAAUGCAAGAGGAGCAGCAUAUGUG | |
| | AUCUUUGAUAUUAUUGAUAAUAAUCCUAAAAUUGACAGUUUUUCAGAGAGAGGACACAAAC | |
| | CAGACAGCAUCAAAGGGAAUUUGGAGUUCAAUGAUGUUCACUUUUCUUACCCUUCUCGAGC | |
| | UAACGUCAAGAUCUUGAAGGGCCUCAACCUGAAGGUGCAGAGUGGGCAGACGGUGGCCCUG | |
| | GUUGGAAGUAGUGGCUGUGGGAAGAGCACAACGGUCCAGCUGAUACAGAGGCUCUAUGACC | |
| | CUGAUGAGGGCACAAUUAACAUUGAUGGGCAGGAUAUUAGGAACUUUAAUGUAAACUAUCU | |
| | GAGGGAAAUCAUUGGUGUGGUGAGUCAGGAGCCGGUGCUGUUUUCCACCACAAUUGCUGAA | |
| | AAUAUUUGUUAUGGCCGUGGAAAUGUAACCAUGGAUGAGAUAAAGAAAGCUGUCAAAGAGG | |
| | CCAACGCCUAUGAGUUUAUCAUGAAAUUACCACAGAAAUUUGACACCCUGGUUGGAGAGAG | |
| | AGGGGCCCAGCUGAGUGGUGGGCAGAAGCAGAGGAUCGCCAUUGCACGUGCCCUGGUUCGC | |
| | AACCCCAAGAUCCUUCUGCUGGAUGAGGCCACGUCAGCAUUGGACACAGAAAGUGAAGCUG | |
| | AGGUACAGGCAGCUCUGGAUAAGGCCAGAGAAGGCCGGACCACCAUUGUGAUAGCACACCG | |
| | ACUGUCUACGGUCCGAAAUGCAGAUGUCAUCGCUGGGUUUGAGGAUGGAGUAAUUGUGGAG | |
| | CAAGGAAGCCACAGCGAACUGAUGAAGAAGGAAGGGGUGUACUUCAAACUUGUCAACAUGC | |
| | AGACAUCAGGAAGCCAGAUCCAGUCAGAAGAAUUUGAACUAAAUGAUGAAAAGGCUGCCAC | |
| | UAGAAUGGCCCCAAAUGGCUGGAAAUCUCGCCUAUUUAGGCAUUCUACUCAGAAAAACCUU | |
| | AAAAAUUCACAAAUGUGUCAGAAGAGCCUUGAUGUGGAAACCGAUGGACUUGAAGCAAAUG | |
| | UGCCACCAGUGUCCUUUCUGAAGGUCCUGAAACUGAAUAAAACAGAAUGGCCCUACUUUGU | |
| | CGUGGGAACAGUAUGUGCCAUUGCCAAUGGGGGGCUUCAGCCGGCAUUUUCAGUCAUAUUC | |
| | UCAGAGAUCAUAGCGAUUUUUGGACCAGGCGAUGAUGCAGUGAAGCAGCAGAAGUGCAACA | |
| | UAUUCUCUUUGAUUUUCUUAUUUCUGGGAAUUAUUUCUUUUUUUACUUUCUUCCUUCAGGG | |
| | UUUCACGUUUGGGAAAGCUGGCGAGAUCCUCACCAGAAGACUGCGGUCAAUGGCUUUUAAA | |
| | GCAAUGCUAAGACAGGACAUGAGCUGGUUUGAUGACCAUAAAAACAGUACUGGUGCACUUU | |
| | CUACAAGACUUGCCACAGAUGCUGCCCAAGUCCAAGGAGCCACAGGAACCAGGUUGGCUUU | |
| | AAUUGCACAGAAUAUAGCUAACCUUGGAACUGGUAUUAUCAUAUCAUUUAUCUACGGUUGG | |
| | CAGUUAACCCUAUUGCUAUUAGCAGUUGUUCCAAUUAUUGCUGUGUCAGGAAUUGUUGAAA | |
| | UGAAAUUGUUGGCUGGAAAUGCCAAAAGAGAUAAAAAAGAACUGGAAGCUGCUGGAAAGAU | |
| | UGCAACAGAGGCAAUAGAAAAUAUUAGGACAGUUGUGUCUUUGACCCAGGAAAGAAAAUUU | |
| | GAAUCAAUGUAUGUUGAAAAAUUGUAUGGACCUUACAGGAAUUCUGUGCAGAAGGCACACA | |
| | UCUAUGGAAUUACUUUUAGUAUCUCACAAGCAUUUAUGUAUUUUUCCUAUGCCGGUUGUUU | |
| | UCGAUUUGGUGCAUAUCUCAUUGUGAAUGGACAUAUGCGCUUCAGAGAUGUUAUUCUGGUG | |
| | UUUUCUGCAAUUGUAUUUGGUGCAGUGGCUCUAGGACAUGCCAGUUCAUUUGCUCCAGACU | |
| | AUGCUAAAGCUAAGCUGUCUGCAGCCCACUUAUUCAUGCUGUUUGAAAGACAACCUCUGAU | |
| | UGACAGCUACAGUGAAGAGGGGCUGAAGCCUGAUAAAUUUGAAGGAAAUAUAACAUUUAAU | |
| | GAAGUCGUGUUCAACUAUCCCACCCGAGCAAACGUGCCAGUGCUUCAGGGGCUGAGCCUGG | |
| | AGGUGAAGAAAGGCCAGACACUAGCCCUGGUGGGCAGCAGUGGCUGUGGGAAGAGCACGGU | |
| | GGUCCAGCUCCUGGAGCGGUUCUACGACCCCUUGGCGGGGACAGUGCUUCUCGAUGGUCAA | |
| | GAAGCAAAGAAACUCAAUGUCCAGUGGCUCAGAGCUCAACUCGGAAUCGUGUCUCAGGAGC | |
| | CUAUCCUAUUUGACUGCAGCAUUGCCGAGAAUAUUGCCUAUGGAGACAACAGCCGGGUUGU | |
| | AUCACAGGAUGAAAUUGUGAGUGCAGCCAAAGCUGCCAACAUACAUCCUUUCAUCGAGACG | |
| | UUACCCCACAAAUAUGAAACAAGAGUGGGAGAUAAGGGGACUCAGCUCUCAGGAGGUCAAA | |
| | AACAGAGGAUUGCUAUUGCCCGAGCCCUCAUCAGACAACCUCAAAUCCUCCUGUUGGAUGA | |
| | AGCUACAUCAGCUCUGGAUACUGAAAGUGAAAAGGUUGUCCAAGAAGCCCUGGACAAAGCC | |
| | AGAGAAGGCCGCACCUGCAUUGUGAUUGCUCACCGCCUGUCCACCAUCCAGAAUGCAGACU | |
| | UAAUAGUGGUGUUUCAGAAUGGGAGAGUCAAGGAGCAUGGCACGCAUCAGCAGCUGCUGGC | |
| | ACAGAAAGGCAUCUAUUUUUCAAUGGUCAGUGUCCAGGCUGGGACACAGAACUUAGAUUAC | |
| | AAGGAUGACGACGAUAAG | |
| 3′ UTR | UGAUAAUAGGCUGGAGCCUCGGUGGCCAUGCUUCUUGCCCCUUGGGCCUCCCCCCAGCCCC | 13 |
| | UCCUCCCCUUCCUGCACCCGUACCCCCGUGGUCUUUGAAUAAAGUCUGAGUGGGCGGC | |
| ELP- | MDLEAAKNGTAWRPTSAEGDFELGISSKQKRKKTKTVKMIGVLTLFRYSDWQDKLFMSLGT | 123 |
| hABCB4- | IMAIAHGSGLPLMMIVFGEMTDKFVDTAGNFSFPVNFSLSLLNPGKILEEEMTRYAYYYSG | |
| 04-001 - | LGAGVLVAAYIQVSFWTLAAGRQIRK1RQKFFHAILRQEIGWFDINDTTELNTRLTDDISK | |
| amino acid | ISEGIGDKVGMFFQAVATFFAGFIVGFIRGWKLTLVIMAISPILGLSAAVWAKILSAFSDK | |
| | ELAAYAKAGAVAEEALGAIRTVIAFGGQNKELERYQKHLENAKEIGIKKAISANISMGIAF | |
| | LLIYASYALAFWYGSTLVISKEYTIGNAMTVFFSILIGAFSVGQAAPCIDAFANARGAAYV | |
| | IFDIIDNNPKIDSFSERGHKPDS1KGNLEFNDVHFSYPSRANVKILKGLNLKVQSGQTVAL | |
| | VGSSGCGKSTTVQLIQRLYDPDEGTINIDGQDIRNFNVNYLREIIGVVSQEPVLFSTTIAE | |
| | NICYGRGNVTMDEIKKAVKEANAYEFIMKLPQKFDTLVGERGAQLSGGQKQRIAIARALVR | |
| | NPKILLLDEATSALDTESEAEVQAALDKAREGRTTIVIAHRLSTVRNADVIAGFEDGVIVE | |
| | QGSHSELMKKEGVYFKLVNMQTSGSQIQSEEFELNDEKAATRMAPNGWKSRLFRHSTQKNL | |
| | KNSQMCQKSLDVETDGLEANVPPVSFLKVLKLNKTEWPYFVVGTVCAIANGGLQPAFSVIE | |
| | SEIIAIFGPGDDAVKQQKCNIFSLIFLFLGIISFFTFFLQGFTFGKAGEILTRRLRSMAFK | |
| | AMLRQDMSWFDDHKNSTGALSTRLATDAAQVQGATGTRLALIAQNIANLGTGIIISFIYGW | |
| | QLTLLLLAVVPIIAVSGIVEMKLLAGNAKRDKKELEAAGKIATEAIEN1RTVVSLTQERKF | |
| | ESMYVEKLYGPYRNSVQKAHIYGITFSISQAFMYFSYAGCFRFGAYLIVNGHMRFRDVILV | |
| | FSAIVFGAVALGHASSFAPDYAKAKLSAAHLFMLFERQPLIDSYSEEGLKPDKFEGNITFN | |
| | EVVFNYPTRANVPVLQGLSLEVKKGQTLALVGSSGCGKSTVVQLLERFYDPLAGTVLLDGQ | |
| | EAKKLNVQWLRAQLGIVSQEPILFDCSIAENIAYGDNSRVVSQDEIVSAAKAANIETPFIE | |
| | TLPHKYETRVGDKGTQLSGGQKQRIAIARALIRQPQILLLDEATSALDTESEKVVQEALDK | |
| | AREGRTCIVIAHRLSTIQNADLIVVFQNGRVKEHGTHQQLLAQKGIYFSMVSVQAGTQNLD | |
| | YKDDDDK | |

SEQ ID NO: 124 includes, from 5′ to 3′, 5′ UTR (SEQ ID NO: 12),
ORF (SEQ ID NO: 249), 3′ UTR (SEQ ID NO: 13)

| | | |
|---|---|---|
| 5′ UTR | GGGAAAUAAGAGAGAAAAGAAGAGUAAGAAGAAAUAUAAGAGCCACC | 12 |
| ORF | AUGGAUCUUGAGGCAGCGAGAAACGGAACAGCACGGCGCCUGGACGGCGACUUUGAACUAG | 249 |
| (excluding | GCAGCAUCAGCAACCAAGGCAGAGAAAAGAAGAAGAAAGUGAAUUUAAUUGGCCUGUUGAC | |
| the stop | ACUGUUCCGAUACUCUGACUGGCAGGAUAAAUUGUUUAUGUUCCUGGGCACCCUCAUGGCC | |
| codon) | AUAGCUCAUGGAUCAGGUCUUCCCCUCAUGAUGAUAGUCUUUGGAGAAAUGACAGAUAAGU | |
| | UUGUAGAUAAUACUGGGAACUUUUCCUUGCCAGUGAAUUUUUCAUUGUCAAUGCUAAAUCC | |
| | AGGAAGAAUUUUGGAAGAAGAAAUGACUAGAUAUGCAUACUACUAUUCGGGACUAGGUGGU | |
| | GGAGUUCUUGUGGCUGCCUAUAUCCAAGUCUCAUUCUGGACUUUGGCAGCUGGCCGACAAA | |
| | UAAAGAAAAUCAGGCAAAAAUUUUUUCAUGCCAUCCUCCGACAAGAAAUGGGCUGGUUUGA | |
| | CAUCAAGGGCACCACUGAACUCAACACACGUCUAACAGAUGACGUCUCCAAAAUCAGUGAA | |
| | GGAAUUGGUGACAAGGUUGGAAUGUUCUUUCAAGCAAUAGCCACGUUUUUUGCAGGAUUCA | |
| | UAGUGGGGUUCAUCAGAGGAUGGAAGCUCACCCUCGUGAUCAUGGCCAUCAGCCCCAUCCU | |
| | GGGGCUCUCUACAGCUGUUUGGGCAAAGAUACUCUCAACAUUUAGUGACAAAGAGCUAGCU | |
| | GCAUAUGCAAAAGCAGGUGCCGUGGCUGAAGAGGCUCUGGGAGCCAUCAGGACCGUGAUAG | |
| | CUUUCGGGGGCCAGAACAAAGAGCUAGAAAGGUAUCAGAAACAUUUAGAAAAUGCCAAAAA | |
| | GAUUGGAAUUAAAAAGGCUAUCUCAGCCAACAUCUCCAUGGGUAUUGCUUUCUUGUUAAUA | |
| | UAUGCAUCCUAUGCACUGGCCUUCUGGUAUGGAUCCACUCUGGUUAUAUCAAAAGAAUAUA | |
| | CAAUUGGAAAUGCAAUGACAGUCUUCUUCUCAAUCCUCAUCGGGGCUUUCAGUGUGGGGCA | |
| | GGCUGCCCCCUGUAUUGAUGCUUUCGCUAAUGCAAGAGGAGCAGCCUAUGUGAUCUUUGAC | |
| | AUUAUUGAUAAUAAUCCUAAAAUUGACAGUUUUUCAGAGAGAGGACACAAACCAGACAACA | |
| | UCAAAGGAAAUUUGGAGUUCAGUGAUGUUCAUUUUUCCUAUCCAUCUCGGGCUAAUAUCAA | |
| | GAUCUUGAAGGGCCUCAACCUGAAGGUGAAGAGUGGACAGACAGUGGCUCUGGUUGGCAAC | |
| | AGCGGCUGUGGAAAAAGCACAACUGUCCAGCUGCUGCAGAGGCUCUACGACCCCACAGAGG | |
| | GUAAGAUUAGCAUCGAUGGGCAGGAUAUCAGGAACUUUAACGUCAGGUGUCUAAGGGAAAU | |
| | CAUUGGUGUGGUAAGUCAAGAGCCCGUGCUGUUCUCUACUACGAUCGCUGAAAAUAUCCGC | |
| | UAUGGCCGUGGGAAUGUAACGAUGGAUGAGAUUGAGAAAGCCGUCAAAGAGGCCAAUGCCU | |
| | AUGACUUCAUCAUGAAACUGCCCCAGAAAUUUGACACCCUGGUUGGUGAUAGAGGGGCGCA | |
| | GCUGAGUGGGGGACAGAAACAGAGAAUCGCCAUUGCCCGGGCCCUGGUCCGCAACCCCAAG | |
| | AUCCUCCUGCUGGACGAGGCCACCUCAGCCCUGGACACUGAAAGUGAAGCUGAGGUGCAGG | |
| | CCGCACUGGAUAAGGCCAGAGAAGGCCGAACCACCAUUGUGAUAGCUCACCGAUUGUCUAC | |
| | CAUCCGGAACGCAGAUGUCAUCGCUGGGUUUGAGGAUGGAGUCAUUGUGGAACAAGGAAGU | |
| | CACAGUGAGCUGAUGAAGAAGGAAGGGAUCUACUUCAGACUCGUUAACAUGCAGACAGCAG | |
| | GAAGCCAGAUCCUGUCAGAAGAAUUUGAAGUUGAGCUAAGUGACGAAAAGGCUGCUGGAGA | |
| | UGUGGCCCCAAAUGGCUGGAAAGCACGCAUAUUUAGGAAUUCUACAAAGAAAAGUCUUAAA | |
| | AGUCCACAUCAGAAUAGGCUGGAUGAAGAAACCAAUGAACUUGAUGCAAACGUGCCACCAG | |
| | UGUCUUUUCUGAAGGUCUUAAAACUGAAUAAAACAGAGUGGCCCUACUUUGUGGUGGGAAC | |
| | AGUCUGUGCCAUUGCCAAUGGAGCCCUCCAGCCGGCUUUCUCCAUCAUCCUGUCUGAGAUG | |
| | AUAGCUAUCUUUGGCCCUGGGGAUGACGCAGUGAAGCAGCAAAAGUGUAACAUGUUCUCCC | |
| | UGGUCUUCUUGGGCCUAGGAGUCCUCUCCUUCUUUACUUUCUUCCUUCAGGGCUUCACGUU | |
| | UGGGAAAGCUGGAGAGAUCCUCACCACAAGGCUCCGGUCCAUGGCCUUUAAAGCGAUGCUA | |
| | AGGCAGGACAUGAGCUGGUUUGAUGAUCAUAAAAACAGUACUGGAGCACUUUCUACAAGAC | |
| | UCGCCACAGAUGCUGCGCAAGUCCAAGGAGCCACGGGAACCAGGUUGGCUUUAAUUGCACA | |
| | GAACACAGCCAACCUUGGAACCGGUAUUAUUAUAUCAUUUAUUUACGGUUGGCAACUGACA | |
| | CUUCUGCUGUUAUCGGUUGUUCCAUUCAUUGCUGUAGCAGGAAUUGUUGAAAUGAAAAUGU | |
| | UGGCUGGCAAUGCCAAGAGAGAUAAAAAGGAAAUGGAAGCUGCUGGAAAGAUUGCAACAGA | |
| | GGCAAUAGAAAAUAUUCGAACUGUUGUAUCCUUGACCCAAGAAAGAAAAUUUGAGUCAAUG | |
| | UAUGUUGAAAAAUUGCAUGGACCUUACAGGAAUUCGGUGCGGAAGGCACACAUCUACGGCA | |
| | UCACUUUUAGCAUCUCCCAAGCAUUCAUGUAUUUUUCUUAUGCUGGCUGUUUUCGAUUUGG | |
| | UUCUUACCUAAUUGUGAAUGGACAUAUGCGCUUCAAAGAUGUCAUUCUGGUCUUUUCUGCA | |
| | AUUGUGCUUGGCGCGGUGGCUCUAGGACACGCCAGCUCAUUUGCUCCGGACUAUGCAAAAG | |
| | CCAAGCUGUCUGCAGCAUACUUGUUCAGCCUGUUUGAAAGACAACCUCUGAUUGACAGCUA | |
| | CAGUGGAGAAGGGCUGUGGCCUGAUAAGUUUGAAGGAAGCGUGACAUUUAAUGAAGUCGUG | |
| | UUCAACUAUCCCACCCGGGCCAACGUGCCAGUGCUUCAGGGGCUGAGCCUUGAGGUGAAGA | |
| | AGGGCCAGACGCUGGCCCUGGUGGGCAGCAGUGGCUGCGGGAAGAGCACAGUGGUCCAGCU | |
| | GCUCGAGCGCUUCUAUGACCCCAUGGCUGGAUCAGUGCUCUUAGAUGGUCAAGAAGCAAAG | |
| | AAACUCAAUGUCCAGUGGCUCCGAGCUCAACUGGGCAUUGUGUCCCAGGAACCCAUUCUCU | |
| | UUGACUGCAGCAUCGCAGAGAACAUCGCCUAUGGAGACAACAGCCGGGUCGUGCCUCAUGA | |
| | UGAGAUUGUGAGGGCAGCCAAGGAGGCCAACAUCCACCCCUUCAUCGAGACGCUGCCCCAA | |
| | AAAUAUAACACAAGAGUAGGAGACAAGGGGACGCAGCUCUCUGGGGGCCAGAAGCAGAGGA | |
| | UUGCCAUCGCCCGAGCCCUCAUCAGACAGCCUCGGGUCCUACUGCUGGAUGAAGCCACGUC | |
| | AGCUCUGGAUACUGAGAGUGAAAAGGUUGUCCAGGAAGCACUGGACAAAGCCAGGGAAGGC | |
| | CGCACCUGCAUUGUGAUCGCUCACCGCCUGUCCACCAUCCAGAACGCGGACUUGAUCGUGG | |
| | UGAUUGAGAACGGCAAGGUCAAGGAGCACGGCACCCACCAGCAGCUGCUGGCGCAGAAGGG | |
| | CAUCUAUUUCUCAAUGGUCAACAUCCAGGCCGGCACACAGAACUUAGAUUACAAGGAUGAC | |
| | GACGAUAAG | |
| 3′ UTR | UGAUAAUAGGCUGGAGCCUCGGUGGCCAUGCUUCUUGCCCCUUGGGCCUCCCCCCAGCCCC | 13 |
| | UCCUCCCCUUCCUGCACCCGUACCCCCGUGGUCUUUGAAUAAAGUCUGAGUGGGCGGC | |
| ELP- | MDLEAARNGTARRLDGDFELGSISNQGREKKKKVNLIGLLTLFRYSDWQDKLFMFLGTLMA | 125 |
| mABCB4- | IAHGSGLPLMMIVFGEMTDKFVDNTGNFSLPVNFSLSMLNPGRILEEEMTRYAYYYSGLGG | |
| 06-001 - | GVLVAAYIQVSFWTLAAGRQIKKIRQKFFHAILRQEMGWFD1KGTTELNTRLTDDVSKISE | |
| amino acid | GIGDKVGMFFQAIATFFAGFIVGFIRGWKLTLVIMAISPILGLSTAVWAKILSTFSDKELA | |
| | AYAKAGAVAEEALGA1RTVIAFGGQNKELERYQKHLENAKKIGIKKAISANISMGIAFLLI | |
| | YASYALAFWYGSTLVISKEYTIGNAMTVFFSILIGAFSVGQAAPCIDAFANARGAAYVIFD | |
| | IIDNNPKIDSFSERGHKPDNIKGNLEFSDVHFSYPSRANIKILKGLNLKVKSGQTVALVGN | |
| | SGCGKSTTVQLLQRLYDPTEGKISIDGQDIRNFNVRCLREHGVVSQEPVLFSTTIAENIRY | |
| | GRGNVTMDE1EKAVKEANAYDFIMKLPQKFDTLVGDRGAQLSGGQKQRIAIARALVRNPKI | |
| | LLLDEATSALDTESEAEVQAALDKAREGRTTIVIAHRLST1RNADVIAGFEDGVIVEQGSH | |
| | SELMKKEGIYFRLVNMQTAGSQILSEEFEVELSDEKAAGDVAPNGWKARIFRNSTKKSLKS | |
| | PHQNRLDEETNELDANVPPVSFLKVLKLNKTEWPYFVVGTVCAIANGALQPAFSIILSEMI | |
| | AIFGPGDDAVKQQKCNMFSLVFLGLGVLSFFTFFLQGFTFGKAGEILTTRLRSMAFKAMLR | |
| | QDMSWFDDHKNSTGALSTRLATDAAQVQGATGTRLALIAQNTANLGTGIIISFIYGWQLTL | |
| | LLLSVVPFIAVAGIVEMKMLAGNAKRDKKEMEAAGKIATEAIEN1RTVVSLTQERKFESMY | |
| | VEKLHGPYRNSVRKAHIYGITFSISQAFMYFSYAGCFRFGSYLIVNGHMRFKDVILVFSAI | |
| | VLGAVALGHASSFAPDYAKAKLSAAYLFSLFERQPLIDSYSGEGLWPDKFEGSVTFNEVVF | |
| | NYPTRANVPVLQGLSLEVKKGQTLALVGSSGCGKSTVVQLLERFYDPMAGSVLLDGQEAKK | |
| | LNVQWLRAQLGIVSQEPILFDCSIAENIAYGDNSRVVPHDEIVRAAKEANIHPFIETLPQK | |
| | YNTRVGDKGTQLSGGQKQRIAIARALIRQPRVLUDEATSALDTESEKVVQEALDKAREGRT | |
| | CIVIAHRLSTIQNADLIVVIENGKVKEHGTHQQLLAQKGIYFSMVNIQAGTQNLDYKDDDD | |
| | K | |

SEQ ID NO: 126 includes, from 5′ to 3′, 5′ UTR (SEQ ID NO: 12),
ORF (SEQ ID NO: 250), 3′ UTR (SEQ ID NO: 172)

| | | |
|---|---|---|
| 5′ UTR | GGGAAAUAAGAGAGAAAAGAAGAGUAAGAAGAAAUAUAAGAGCCACC | 12 |
| ORF | AUGGAUUUAGAAGCCGCCAAGAACGGAACCGCCUGGCGUCCCACCAGCGCCGAGGGCGAUU | 250 |
| (excluding | UCGAACUUGGCAUCUCAAGCAAACAAAAGAGGAAAAAAACAAAGACCGUGAAGAUGAUAGG | |
| the stop | CGUUCUCACCCUGUUCAGGUACAGCGAUUGGCAGGAUAAGCUGUUCAUGUCCCUGGGUACA | |
| codon) | AUUAUGGCCAUCGCCCAUGGCUCCGGCCUGCCGCUGAUGAUGAUCGUUUUUGGAGAGAUGA | |
| | CCGACAAAUUUGUGGAUACCGCCGGGAACUUCUCAUUCCCUGUGAACUUCAGCCUGAGCCU | |
| | GCUGAACCCUGGCAAGAUCCUGGAGGAAGAGAUGACCAGAUACGCCUACUACUACUCUGGC | |
| | CUGGGUGCGGGAGUCCUGGUUGCCGCUUACAUUCAGGUGAGCUUUUGGACCCUGGCCGCCG | |
| | GCAGACAGAUCCGUAAAAUCAGGCAAAAGUUCUUCCACGCCAUCCUCAGACAGGAAAUCGG | |
| | CUGGUUCGACAUCAAUGACACCACCGAGCUGAACACAAGGCUGACAGACGAUAUCUCUAAG | |
| | AUCUCAGAAGGCAUCGGAGAUAAGGUGGGCAUGUUCUUCCAGGCCGUCGCCACCUUUUUCG | |
| | CCGGCUUCAUCGUGGGCUUCAUCCGCGGAUGGAAACUGACCCUUGUGAUCAUGGCCAUCAG | |
| | CCCAAUCCUGGGCCUGAGCGCCGCCGUGUGGGCCAAGAUCCUGUCUGCUUUUAGCGACAAG | |
| | GAGCUGGCCGCGUACGCUAAGGCCGGCGCCGUGGCCGAGGAGGCUCUGGGCGCCAUCAGAA | |
| | CCGUGAUCGCUUUUGGGGGACAAAACAAGGAGCUGGAACGGUACCAGAAGCACCUGGAGAA | |
| | CGCUAAGGAGAUCGGGAUCAAGAAGGCCAUCUCCGCUAAUAUCAGCAUGGGGAUCGCCUUC | |
| | UUACUGAUAUACGCUAGCUACGCCCUGGCCUUUUGGUACGGCAGCACCCUGGUGAUUUCCA | |
| | AGGAGUACACCAUUGGCAACGCCAUGACCGUGUUCUUCUCUAUCCUCAUCGGUGCUUUUUC | |
| | CGUUGGCCAGGCCGCCCCCUGCAUCGACGCCUUCGCCAACGCUAGAGGCGCCGCCUACGUC | |
| | AUCUUCGAUAUCAUCGACAACAAUCCAAAGAUUGACAGCUUCAGCGAGCGGGGCCAUAAGC | |
| | CAGACUCAAUCAAGGGGAACCUUGAAUUCAAUGACGUCCAUUUCUCCUACCCCUCUCGAGC | |
| | CAAUGUGAAGAUACUGAAGGGGCUGAACCUGAAGGUGCAGUCCGGUCAGACCGUUGCCCUG | |
| | GUGGGCAGCUCCGGAUGUGGGAAGUCUACCACCGUACAGUUGAUCCAGCGACUGUACGACC | |
| | CAGACGAAGGCACCAUCAACAUUGAUGGCCAGGACAUCCGGAAUUUUAAUGUGAACUACCU | |
| | GAGAGAGAUUAUCGGCGUGGUCUCCCAGGAACCCGUCCUGUUCUCCACAACUAUCGCCGAG | |
| | AACAUCUGUUACGGAAGAGGAAACGUGACCAUGGACGAGAUAAAGAAGGCCGUCAAAGAGG | |
| | CAAAUGCCUACGAGUUCAUUAUGAAGCUGCCUCAGAAGUUCGACACCCUGGUCGGCGAGAG | |
| | AGGGGCCCAGCUGUCUGGGGGCCAGAAGCAGAGAAUCGCCAUCGCCAGGGCUCUCGUCCGG | |
| | AACCCCAAGAUUCUCCUCCUGGAUGAGGCCACCAGCGCCCUGGACACCGAAAGCGAAGCCG | |
| | AGGUCCAGGCCGCCCUGGACAAGGCCCGAGAGGGCAGGACCACCAUCGUGAUCGCCCAUAG | |
| | GUUGAGCACCGUGAGGAAUGCCGACGUGAUCGCUGGAUUCGAGGACGGCGUUAUCGUGGAG | |
| | CAGGGCUCUCACUCGGAGCUGAUGAAAAAAGAGGGCGUGUACUUCAAACUCGUGAACAUGC | |
| | AGACUUCCGGAUCACAGAUCCAGUCCGAGGAGUUCGAGCUCAACGAUGAGAAGGCUGCCAC | |
| | UAGAAUGGCACCAAACGGCUGGAAGUCCCGUCUUUUCAGACACUCUACGCAGAAGAAUCUG | |
| | AAGAACAGCCAGAUGUGCCAGAAGUCUCUGGACGUGGAAACGGACGGCCUGGAAGCCAACG | |
| | UCCCUCCCGUGUCCUUCCUGAAAGUCCUGAAGCUAAACAAAACAGAGUGGCCUUACUUUGU | |
| | GGUGGGCACUGUUUGCGCCAUCGCCAACGGCGGCCUGCAGCCUGCGUUCAGCGUGAUCUUU | |
| | AGCGAGAUUAUAGCUAUUUUUGGCCCUGGAGACGAUGCUGUGAAGCAACAGAAGUGCAACA | |
| | UCUUUAGUCUUAUCUUCCUUUUCCUCGGAAUCAUCAGCUUUUUCACGUUCUUCCUUCAGGG | |
| | UUUUACCUUUGGCAAGGCCGGAGAGAUACUCACUAGACGCCUGAGAUCAAUGGCUUUUAAG | |
| | GCCAUGCUGAGACAGGACAUGAGCUGGUUCGACGACCACAAGAAUUCUACCGGAGCACUGU | |
| | CCACAAGACUGGCAACCGACGCCGCCCAGGUCCAGGGGGCCACUGGCACCCGGCUGGCCCU | |
| | GAUCGCUCAAAACAUUGCAAACCUGGGAACUGGCAUCAUCAUUAGCUUCAUCUAUGGAUGG | |
| | CAGCUGACACUUCUGCUGCUGGCCGUCGUGCCAAUUAUCGCCGUGAGCGGGAUCGUCGAGA | |
| | UGAAACUCCUCGCUGGGAAUGCUAAGAGGGACAAGAAGGAGCUGGAGGCCGCGGGCAAGAU | |
| | CGCCACUGAGGCUAUCGAGAAUAUCCGCACCGUUGUGAGCUUGACACAGGAGAGAAAGUUC | |
| | GAGAGCAUGUAUGUGGAGAAGCUGUACGGACCAUACAGAAAUUCAGUGCAGAAGGCCCACA | |
| | UCUACGGAAUUACCUUCUCCAUCAGCCAGGCAUUCAUGUACUUUUCUUACGCCGGCUGUUU | |
| | UAGAUUCGGCGCAUACCUGAUCGUGAACGGCCAUAUGAGGUUCAGAGACGUGAUCCUGGUU | |
| | UUCUCCGCCAUAGUGUUUGGCGCUGUCGCUCUGGGCCACGCCAGCUCAUUUGCUCCCGAUU | |
| | AUGCAAAGGCAAAGCUGUCCGCCGCACACCUCUUCAUGCUCUUCGAGCGUCAGCCUCUGAU | |
| | CGACUCCUACUCAGAGGAGGGGCUCAAGCCCGACAAGUUCGAAGGCAACAUCACUUUCAAC | |
| | GAAGUGGUGUUCAACUACCCUACCCGGGCAAACGUGCCUGUGCUGCAGGGCCUGAGCCUGG | |
| | AGGUGAAGAAAGGACAGACCCUGGCUCUGGUAGGCUCAUCCGGAUGCGGCAAAUCAACAGU | |
| | GGUGCAACUGCUCGAGCGGUUCUACGACCCCCUGGCGGGGACCGUUCUCCUGGAUGGCCAG | |
| | GAGGCAAAGAAGCUGAACGUGCAGUGGCUGAGAGCACAGCUGGGGAUUGUGUCCCAGGAAC | |
| | CGAUUCUGUUUGACUGCAGCAUCGCCGAGAACAUCGCCUACGGAGAUAACAGCAGGGUGGU | |
| | GAGCCAGGAUGAGAUCGUGAGCGCCGCAAAAGCCGCCAACAUCCACCCCUUCAUUGAGACC | |
| | CUGCCACACAAGUACGAGACCAGAGUGGGCGACAAGGGCACCCAGCUGUCAGGAGGACAGA | |
| | AGCAGCGUAUCGCCAUCGCCAGAGCCCUGAUUCGGCAGCCCCAGAUUCUGCUGCUGGACGA | |
| | GGCUACAAGCGCUCUGGACACCGAGUCCGAAAAGGUGGUGCAGGAGGCACUUGACAAGGCC | |
| | AGAGAGGGCAGAACCUGCAUAGUGAUUGCCCACAGACUGAGCACCAUUCAAAACGCCGACC | |
| | UGAUCGUGGUUUUCCAGAAUGGGCGGGUUAAGGAGCAUGGCACCCACCAGCAACUGCUGGC | |
| | CCAGAAGGGCAUCUAUUUCAGCAUGGUGAGCGUGCAGGCCGGCACACAGAAUCUG | |
| 3′ UTR | UGAUAAUAGGCUGGAGCCUCGGUGGCCAUGCUUCUUGCCCCUUGGGCCUCCCCCCAGCCCC | 172 |
| | UCCUCCCCUUCCUGCACCCGUACCCCCUCCAUAAAGUAGGAAACACUACAGUGGUCUUUGA | |
| | AUAAAGUCUGAGUGGGCGGC | |
| ELP- | MDLEAAKNGTAWRPTSAEGDFELGISSKQKRKKTKTVKMIGVLTLFRYSDWQDKLFMSLGT | 127 |
| hPFIC3- | IMAIAHGSGLPLMMIVFGEMTDKFVDTAGNFSFPVNFSLSLLNPGKILEEEMTRYAYYYSG | |
| 03-002 - | LGAGVLVAAYIQVSFWTLAAGRQIRK1RQKFFHAILRQEIGWFDINDTTELNTRLTDDISK | |
| amino acid | ISEGIGDKVGMFFQAVATFFAGFIVGFIRGWKLTLVIMAISPILGLSAAVWAKILSAFSDK | |
| | ELAAYAKAGAVAEEALGA1RTVIAFGGQNKELERYQKHLENAKEIGIKKAISANISMGIAF | |
| | LLIYASYALAFWYGSTLVISKEYTIGNAMTVFFSILIGAFSVGQAAPCIDAFANARGAAVV | |
| | IFDIIDNNPKIDSFSERGHKPDSIKGNLEFNDVHFSYPSRANVKILKGLNLKVQSGQTVAL | |
| | VGSSGCGKSTTVQLIQRLYDPDEGTINIDGQDIRNFNVNYLREIIGVVSQEPVLFSTTIAE | |
| | NICYGRGNVTMDEIKKAVKEANAYEHMKLPQKFDTLVGERGAQLSGGQKQRIAIARALVRN | |
| | PKILLLDEATSALDTESEAEVQAALDKAREGRTTIVIAHRLSTVRNADVIAGFEDGVIVEQ | |
| | GSHSELMKKEGVYFKLVNMQTSGSQIQSEEFELNDEKAATRMAPNGWKSRLFRHSTQKNLK | |
| | NSQMCQKSLDVETDGLEANVPPVSFLKVLKLNKTEWPYFVVGTVCAIANGGLQPAFSVIFS | |
| | EIIAIFGPGDDAVKQQKCNIFSLIFLFLGIISFFTFFLQGFTFGKAGEILTRRLRSMAFKA | |
| | MLRQDMSWFDDHKNSTGALSTRLATDAAQVQGATGTRLALIAQNIANLGTGIIISFIYGWQ | |
| | LTLLLLAVVPIIAVSGIVEMKLLAGNAKRDKKELEAAGKIATEAIEN1RTVVSLTQERKFE | |
| | SMYVEKLYGPYRNSVQKAHIYGITFSISQAFMYFSVAGCFRFGAYLIVNGHMRFRDVILVF | |
| | SAIVFGAVALGHASSFAPDYAKAKLSAAHLFMLFERQPLIDSYSEEGLKPDKFEGNITFNE | |
| | VVFNYPTRANVPVLQGLSLEVKKGQTLALVGSSGCGKSTVVQLLERFYDPLAGTVLLDGQE | |
| | AKKLNVQWLRAQLGIVSQEPILFDCSIAENIAYGDNSRVVSQDEIVSAAKAANIHPFIETL | |
| | PHKYETRVGDKGTQLSGGQKQRIAIARALIRQPQILLLDEATSALDTESEKVVQEALDKAR | |
| | EGRTCIVIAHRLSTIQNADLIVVFQNGRVKEHGTHQQLLAQKGIYFSMVSVQAGTQNL | |

SEQ ID NO: 128 includes, from 5′ to 3′, 5′ UTR (SEQ ID NO: 12),
ORF (SEQ ID NO: 251), 3′ UTR (SEQ ID NO: 172)

| | | |
|---|---|---|
| 5′ UTR | GGGAAAuAAGAGAGAAAAGAAGAGuAAGAAGAAAuAuAAGAGCCACC | 12 |
| ORF | AUGGACCUAGAGGCUGCCAAGAACGGGACCGCCUGGAGGCCCACAAGCGCAGAAGGGGACU | 251 |
| (excluding | UUGAACUGGGCAUCAGCUCCAAGCAGAAAAGAAAGAAGACAAAAACAGUCAAGAUGAUCGG | |
| the stop | CGUGCUGACACUGUUCAGAUACAGCGACUGGCAGGACAAACUGUUCAUGAGCCUGGGCACC | |
| codon) | AUCAUGGCCAUCGCGCAUGGUAGCGGCCUCCCUCUGAUGAUGAUCGUAUUCGGCGAAAUGA | |
| | CCGAUAAGUUCGUUGACACUGCCGGGAACUUCAGCUUUCCCGUCAACUUUAGCCUGAGCCU | |
| | GUUGAACCCCGGCAAGAUCCUGGAGGAGGAGAUGACCAGGUAUGCCUAUUAUUAUAGCGGA | |
| | CUGGGCGCAGGGGUGCUGGUGGCGGCCUACAUACAGGUGUCUUUUUGGACUCUGGCCGCCG | |
| | GCAGACAGAUCCGGAAAAUCCGGCAGAAGUUCUUCCAUGCUAUCCUUAGGCAGGAGAUUGG | |
| | CUGGUUCGACAUCAACGAUACUACUGAGCUCAACACACGACUUACCGACGACAUCAGCAAG | |
| | AUUUCCGAGGGCAUCGGCGAUAAGGUGGGCAUGUUCUUCCAAGCCGUUGCCACAUUUUUCG | |
| | CAGGGUUCAUCGUUGGCUUCAUUAGAGGCUGGAAGCUCACACUGGUCAUCAUGGCAAUCAG | |
| | CCCCAUCCUGGGGCUGAGCGCCGCCGUGUGGGCAAAGAUCCUCAGCGCUUUCAGUGACAAG | |
| | GAGCUGGCUGCCUACGCGAAGGCCGGCGCCGUGGCUGAGGAGGCGCUGGGCGCCAUACGAA | |
| | CCGUGAUCGCCUUCGGAGGUCAAAACAAGGAGCUCGAGAGAUAUCAGAAACACCUGGAGAA | |
| | CGCCAAAGAGAUUGGAAUCAAGAAAGCUAUCUCUGCCAACAUUAGCAUGGGCAUCGCCUUC | |
| | CUUCUGAUAUACGCCAGCUACGCACUGGCCUUUUGGUACGGCUCUACACUGGUGAUCUCCA | |
| | AGGAAUACACCAUCGGAAAUGCCAUGACCGUGUUCUUUAGCAUCCUGAUCGGCGCCUUCAG | |
| | CGUGGGGCAGGCCGCUCCCUGUAUCGACGCGUUUGCCAACGCUAGAGGCGCCGCCUACGUC | |
| | AUCUUUGACAUCAUCGACAAUAACCCUAAGAUUGACUCUUUUAGCGAAAGAGGCCACAAGC | |
| | CAGAUAGCAUCAAGGGCAACCUUGAGUUCAAUGACGUCCACUUCUCCUAUCCCAGCCGGGC | |
| | CAAUGUGAAGAUUCUGAAGGGACUGAACCUGAAGGUACAGAGCGGCCAGACUGUGGCCCUG | |
| | GUCGGCAGCUCCGGAUGCGGAAAGUCUACCACAGUCCAGCUGAUCCAGAGGCUCUACGAUC | |
| | CAGACGAGGGAACGAUCAACAUCGAUGGCCAGGAUAUCCGGAACUUCAACGUGAAUUAUCU | |
| | CAGAGAGAUCAUCGGCGUGGUGUCCCAAGAGCCCGUGCUCUUCAGCACAACCAUUGCCGAA | |
| | AACAUAUGCUACGGCAGGGGCAACGUUACAAUGGACGAGAUCAAGAAGGCGGUGAAGGAGG | |
| | CCAAUGCUUAUGAAUUCAUUAUGAAGCUGCCCCAGAAGUUUGACACCCUGGUGGGCGAGAG | |
| | AGGCGCCCAGCUUUCCGGCGGCCAGAAGCAGAGAAUUGCCAUCGCCAGAGCACUGGUUAGA | |
| | AACCCCAAGAUCCUGCUGCUGGACGAGGCCACCUCCGCCCUGGACACCGAGAGCGAGGCCG | |
| | AGGUCCAGGCCGCCUUGGACAAAGCCAGAGAGGGCAGAACCACCAUCGUGAUCGCACACCG | |
| | CCUGUCCACCGUGAGGAAUGCCGACGUGAUCGCCGGAUUCGAAGACGGCGUGAUCGUGGAG | |
| | CAGGGAAGCCACAGCGAGCUGAUGAAGAAGGAGGGAGUCUACUUUAAACUCGUGAAUAUGC | |
| | AGACGAGCGGGAGCCAGAUCCAGAGCGAGGAGUUCGAACUGAACGAUGAGAAGGCCGCAAC | |
| | GAGAAUGGCACCCAACGGCUGGAAGAGCAGGCUGUUCAGACACAGCACGCAGAAAAAUCUA | |
| | AAAAACUCCCAGAUGUGCCAGAAGUCCCUCGACGUGGAAACCGAUGGCCUGGAGGCCAACG | |
| | UGCCCCCCGUCAGUUUCCUGAAAGUGCUGAAGCUCAACAAGACCGAGUGGCCCUACUUCGU | |
| | CGUGGGGACCGUGUGUGCCAUUGCCAAUGGCGGUUUGCAGCCCGCGUUCAGCGUGAUUUUU | |
| | AGCGAAAUUAUCGCCAUUUUUGGCCCCGGCGACGACGCCGUGAAACAGCAGAAGUGCAACA | |
| | UUUUCAGUCUCAUCUUUCUCUUUCUGGGCAUCAUCUCUUUCUUUACCUUUUUCCUGCAGGG | |
| | AUUCACGUUUGGCAAGGCUGGCGAGAUUCUGACAAGACGCCUCCGGAGCAUGGCCUUCAAG | |
| | GCCAUGCUCAGACAGGACAUGUCCUGGUUCGACGAUCACAAGAACUCAACCGGGGCUCUGA | |
| | GCACCAGGUUAGCUACCGAUGCGGCUCAGGUCCAGGGCGCCACCGGCACUCGCCUCGCCCU | |
| | GAUCGCCCAGAACAUCGCUAACCUGGGAACAGGCAUCAUCAUCUCAUUUAUCUACGGCUGG | |
| | CAGCUGACCCUGCUCCUUCUGGCCGUUGUGCCCAUAAUUGCCGUGAGCGGCAUAGUGGAGA | |
| | UGAAGCUCCUGGCUGGGAACGCAAAGCGGGAUAAGAAGGAGCUGGAGGCCGCUGGAAAGAU | |
| | CGCUACAGAAGCAAUCGAGAACAUCAGAACCGUGGUGUCCCUGACACAAGAGCGGAAGUUC | |
| | GAGUCCAUGUACGUGGAGAAACUGUACGGACCUUACAGAAACUCCGUCCAGAAGGCCCAUA | |
| | UAUAUGGAAUCACCUUUAGUAUUAGCCAGGCCUUCAUGUACUUCUCCUACGCUGGCUGCUU | |
| | UCGGUUCGGUGCCUACCUGAUAGUGAAUGGACACAUGCGGUUCAGGGAUGUCAUCUUGGUG | |
| | UUCUCCGCCAUCGUCUUUGGCGCCGUGGCCCUGGGCCACGCUUCCAGCUUUGCCCCUGAUU | |
| | ACGCCAAGGCCAAGCUGAGCGCCGCCCACCUGUUUAUGCUCUUCGAAAGGCAGCCGCUGAU | |
| | AGAUAGCUACUCUGAAGAGGGCUUGAAGCCCGACAAGUUCGAGGGCAACAUAACCUUUAAC | |
| | GAAGUCGUGUUCAACUACCCUACCAGAGCCAACGUCCCAGUGCUUCAGGGCCUGAGCUUGG | |
| | AGGUGAAGAAAGGACAGACCCUUGCCUUAGUGGGCUCUAGUGGCUGCGGGAAGAGCACUGU | |
| | GGUCCAGCUCUUGGAGAGAUUCUACGACCCCUUAGCAGGCACCGUCCUUCUGGAUGGACAG | |
| | GAGGCCAAAAAACUCAACGUGCAGUGGCUGAGAGCACAGCUGGGCAUUGUGAGCCAGGAAC | |
| | CCAUCCUGUUUGACUGUUCCAUCGCCGAGAAUAUUGCAUACGGCGACAACAGCAGGGUGGU | |
| | GAGCCAGGAUGAGAUCGUGUCCGCAGCGAAAGCAGCCAACAUACACCCCUUCAUCGAGACA | |
| | CUGCCUCACAAGUACGAGACCAGGGUGGGCGAUAAGGGCACACAGCUGUCUGGCGGCCAGA | |
| | AGCAGCGUAUUGCCAUCGCCAGAGCCCUGAUUAGACAGCCACAGAUCCUGCUGCUGGAUGA | |
| | AGCUACCUCUGCACUUGACACCGAGUCCGAGAAGGUCGUGCAGGAGGCCCUGGAUAAGGCG | |
| | AGAGAAGGCCGCACUUGCAUAGUGAUCGCGCACAGACUCAGCACAAUCCAAAACGCCGACC | |
| | UUAUCGUUGUCUUCCAAAACGGGAGGGUGAAGGAGCAUGGCACUCACCAACAGCUGCUUGC | |
| | CCAGAAGGGGAUAUACUUCUCCAUGGUAUCCGUACAGGCUGGCACCCAGAAUCUG | |
| 3′ UTR | UGAUAAUAGGCUGGAGCCUCGGUGGCCAUGCUUCUUGCCCCUUGGGCCUCCCCCCAGCCCC | 172 |
| | UCCUCCCCUUCCUGCACCCGUACCCCCUCCAUAAAGUAGGAAACACUACAGUGGUCUUUGA | |
| | AUAAAGUCUGAGUGGGCGGC | |
| ELP- | MDLEAAKNGTAWRPTSAEGDFELGISSKQKRKKTKTVKMIGVLTLFRYSDWQDKLFMSLGT | 129 |
| hPFIC3- | IMAIAHGSGLPLMMIVFGEMTDKFVDTAGNFSFPVNFSLSLLNPGKILEEEMTRYAYYYSG | |
| 03-011 - | LGAGVLVAAYIQVSFWTLAAGRQIRK1RQKFFHAILRQEIGWFDINDTTELNTRLTDDISK | |
| amino acid | ISEGIGDKVGMFFQAVATFFAGFIVGFIRGWKLTLVIMAISPILGLSAAVWAKILSAFSDK | |
| | ELAAYAKAGAVAEEALGAIRTVIAFGGQNKELERYQKHLENAKEIGIKKAISANISMGIAF | |
| | LLIYASYALAFWYGSTLVISKEYTIGNAMTVFFSILIGAFSVGQAAPCIDAFANARGAAYV | |
| | IFDIIDNNPKIDSFSERGHKPDS1KGNLEFNDVHFSYPSRANVKILKGLNLKVQSGQTVAL | |
| | VGSSGCGKSTTVQLIQRLYDPDEGTINIDGQDIRNFNVNYLREIIGVVSQEPVLFSTTIAE | |
| | NICYGRGNVTMDEIKKAVKEANAYEFIMKLPQKFDTLVGERGAQLSGGQKQRIAIARALVR | |
| | NPKILLLDEATSALDTESEAEVQAALDKAREGRTTIVIAHRLSTVRNADVIAGFEDGVIVE | |
| | QGSHSELMKKEGVYFKLVNMQTSGSQIQSEEFELNDEKAATRMAPNGWKSRLFRHSTQKNL | |
| | KNSQMCQKSLDVETDGLEANVPPVSFLKVLKLNKTEWPYFVVGTVCAIANGGLQPAFSVIE | |
| | SEIIAIFGPGDDAVKQQKCNIFSLIFLFLGIISFFTFFLQGFTFGKAGEILTRRLRSMAFK | |
| | AMLRQDMSWFDDHKNSTGALSTRLATDAAQVQGATGTRLALIAQNIANLGTGIIISFIYGW | |
| | QLTLLLLAVVPIIAVSGIVEMKLLAGNAKRDKKELEAAGKIATEAIEN1RTVVSLTQERKF | |
| | ESMYVEKLYGPYRNSVQKAHIYGITFSISQAFMYFSYAGCFRFGAYLIVNGHMRFRDVILV | |
| | FSAIVFGAVALGHASSFAPDYAKAKLSAAHLFMLFERQPLIDSYSEEGLKPDKFEGNITFN | |
| | EVVFNYPTRANVPVLQGLSLEVKKGQTLALVGSSGCGKSTVVQLLERFYDPLAGTVLLDGQ | |
| | EAKKLNVQWLRAQLGIVSQEPILFDCSIAENIAYGDNSRVVSQDEIVSAAKAANIETPFIE | |
| | TLPHKYETRVGDKGTQLSGGQKQRIAIARALIRQPQILLLDEATSALDTESEKVVQEALDK | |
| | AREGRTCIVIAHRLSTIQNADLIVVFQNGRVKEHGTHQQLLAQKGIYFSMVSVQAGTQNL | |

SEQ ID NO: 130 includes, from 5′ to 3′, 5′ UTR (SEQ ID NO: 12),
ORF (SEQ ID NO: 252), 3′ UTR (SEQ ID NO: 172)

| | | |
|---|---|---|
| 5′ UTR | GGGAAAUAAGAGAGAAAAGAAGAGUAAGAAGAAAUAUAAGAGCCACC | 12 |
| ORF | AUGGAUUUAGAAGCCGCCAAGAACGGAACCGCCUGGCGUCCCACCAGCGCCGAGGGCGAUU | 252 |
| (excluding | UCGAACUUGGCAUCUCAAGCAAACAAAAGAGGAAAAAAACAAAGACCGUGAAGAUGAUAGG | |
| the stop | CGUUCUCACCCUGUUCAGGUACAGCGAUUGGCAGGAUAAGCUGUUCAUGUCCCUGGGUACA | |
| codon) | AUUAUGGCCAUCGCCCAUGGCUCCGGCCUGCCGCUGAUGAUGAUCGUUUUUGGAGAGAUGA | |
| | CCGACAAAUUUGUGGAUACCGCCGGGAACUUCUCAUUCCCUGUGAACUUCAGCCUGAGCCU | |
| | GCUGAACCCUGGCAAGAUCCUGGAGGAAGAGAUGACCAGAUACGCCUACUACUACUCUGGC | |
| | CUGGGUGCGGGAGUCCUGGUUGCCGCUUACAUUCAGGUGAGCUUUUGGACCCUGGCCGCCG | |
| | GCAGACAGAUCCGUAAAAUCAGGCAAAAGUUCUUCCACGCCAUCCUCAGACAGGAAAUCGG | |
| | CUGGUUCGACAUCAAUGACACCACCGAGCUGAACACAAGGCUGACAGACGAUAUCUCUAAG | |
| | AUCUCAGAAGGCAUCGGAGAUAAGGUGGGCAUGUUCUUCCAGGCCGUCGCCACCUUUUUCG | |
| | CCGGCUUCAUCGUGGGCUUCAUCCGCGGAUGGAAACUGACCCUUGUGAUCAUGGCCAUCAG | |
| | CCCAAUCCUGGGCCUGAGCGCCGCCGUGUGGGCCAAGAUCCUGUCUGCUUUUAGCGACAAG | |
| | GAGCUGGCCGCGUACGCUAAGGCCGGCGCCGUGGCCGAGGAGGCUCUGGGCGCCAUCAGAA | |
| | CCGUGAUCGCUUUUGGGGGACAAAACAAGGAGCUGGAACGGUACCAGAAGCACCUGGAGAA | |
| | CGCUAAGGAGAUCGGGAUCAAGAAGGCCAUCUCCGCUAAUAUCAGCAUGGGGAUCGCCUUC | |
| | UUACUGAUAUACGCUAGCUACGCCCUGGCCUUUUGGUACGGCAGCACCCUGGUGAUUUCCA | |
| | AGGAGUACACCAUUGGCAACGCCAUGACCGUGUUCUUCUCUAUCCUCAUCGGUGCUUUUUC | |
| | CGUUGGCCAGGCCGCCCCCUGCAUCGACGCCUUCGCCAACGCUAGAGGCGCCGCCUACGUC | |
| | AUCUUCGAUAUCAUCGACAACAAUCCAAAGAUUGACAGCUUCAGCGAGCGGGGCCAUAAGC | |
| | CAGACUCAAUCAAGGGGAACCUUGAAUUCAAUGACGUCCAUUUCUCCUACCCCUCUCGAGC | |
| | CAAUGUGAAGAUACUGAAGGGGCUGAACCUGAAGGUGCAGUCCGGUCAGACCGUUGCCCUG | |
| | GUGGGCAGCUCCGGAUGUGGGAAGUCUACCACCGUACAGUUGAUCCAGCGACUGUACGACC | |
| | CAGACGAAGGCACCAUCAACAUUGAUGGCCAGGACAUCCGGAAUUUUAAUGUGAACUACCU | |
| | GAGAGAGAUUAUCGGCGUGGUCUCCCAGGAACCCGUCCUGUUCUCCACAACUAUCGCCGAG | |
| | AACAUCUGUUACGGAAGAGGAAACGUGACCAUGGACGAGAUAAAGAAGGCCGUCAAAGAGG | |
| | CAAAUGCCUACGAGUUCAUUAUGAAGCUGCCUCAGAAGUUCGACACCCUGGUCGGCGAGAG | |
| | AGGGGCCCAGCUGUCUGGGGGCCAGAAGCAGAGAAUCGCCAUCGCCAGGGCUCUCGUCCGG | |
| | AACCCCAAGAUUCUCCUCCUGGAUGAGGCCACCAGCGCCCUGGACACCGAAAGCGAAGCCG | |
| | AGGUCCAGGCCGCCCUGGACAAGGCCCGAGAGGGCAGGACCACCAUCGUGAUCGCCCAUAG | |
| | GUUGAGCACCGUGAGGAAUGCCGACGUGAUCGCUGGAUUCGAGGACGGCGUUAUCGUGGAG | |
| | CAGGGCUCUCACUCGGAGCUGAUGAAAAAAGAGGGCGUGUACUUCAAACUCGUGAACAUGC | |
| | AGACUUCCGGAUCACAGAUCCAGUCCGAGGAGUUCGAGCUCAACGAUGAGAAGGCUGCCAC | |
| | UAGAAUGGCACCAAACGGCUGGAAGUCCCGUCUUUUCAGACACUCUACGCAGAAGAAUCUG | |
| | AAGAACAGCCAGAUGUGCCAGAAGUCUCUGGACGUGGAAACGGACGGCCUGGAAGCCAACG | |
| | UCCCUCCCGUGUCCUUCCUGAAAGUCCUGAAGCUAAACAAAACAGAGUGGCCUUACUUUGU | |
| | GGUGGGCACUGUUUGCGCCAUCGCCAACGGCGGCCUGCAGCCUGCGUUCAGCGUGAUCUUU | |
| | AGCGAGAUUAUAGCUAUUUUUGGCCCUGGAGACGAUGCUGUGAAGCAACAGAAGUGCAACA | |
| | UCUUUAGUCUUAUCUUCCUUUUCCUCGGAAUCAUCAGCUUUUUCACGUUCUUCCUUCAGGG | |
| | UUUUACCUUUGGCAAGGCCGGAGAGAUACUCACUAGACGCCUGAGAUCAAUGGCUUUUAAG | |
| | GCCAUGCUGAGACAGGACAUGAGCUGGUUCGACGACCACAAGAAUUCUACCGGAGCACUGU | |
| | CCACAAGACUGGCAACCGACGCCGCCCAGGUCCAGGGGGCCACUGGCACCCGGCUGGCCCU | |
| | GAUCGCUCAAAACAUUGCAAACCUGGGAACUGGCAUCAUCAUUAGCUUCAUCUAUGGAUGG | |
| | CAGCUGACACUUCUGCUGCUGGCCGUCGUGCCAAUUAUCGCCGUGAGCGGGAUCGUCGAGA | |
| | UGAAACUCCUCGCUGGGAAUGCUAAGAGGGACAAGAAGGAGCUGGAGGCCGCGGGCAAGAU | |
| | CGCCACUGAGGCUAUCGAGAAUAUCCGCACCGUUGUGAGCUUGACACAGGAGAGAAAGUUC | |
| | GAGAGCAUGUAUGUGGAGAAGCUGUACGGACCAUACAGAAAUUCAGUGCAGAAGGCCCACA | |
| | UCUACGGAAUUACCUUCUCCAUCAGCCAGGCAUUCAUGUACUUUUCUUACGCCGGCUGUUU | |
| | UAGAUUCGGCGCAUACCUGAUCGUGAACGGCCAUAUGAGGUUCAGAGACGUGAUCCUGGUU | |
| | UUCUCCGCCAUAGUGUUUGGCGCUGUCGCUCUGGGCCACGCCAGCUCAUUUGCUCCCGAUU | |
| | AUGCAAAGGCAAAGCUGUCCGCCGCACACCUCUUCAUGCUCUUCGAGCGUCAGCCUCUGAU | |
| | CGACUCCUACUCAGAGGAGGGGCUCAAGCCCGACAAGUUCGAAGGCAACAUCACUUUCAAC | |
| | GAAGUGGUGUUCAACUACCCUACCCGGGCAAACGUGCCUGUGCUGCAGGGCCUGAGCCUGG | |
| | AGGUGAAGAAAGGACAGACCCUGGCUCUGGUAGGCUCAUCCGGAUGCGGCAAAUCAACAGU | |
| | GGUGCAACUGCUCGAGCGGUUCUACGACCCCCUGGCGGGGACCGUUCUCCUGGAUGGCCAG | |
| | GAGGCAAAGAAGCUGAACGUGCAGUGGCUGAGAGCACAGCUGGGGAUUGUGUCCCAGGAAC | |
| | CGAUUCUGUUUGACUGCAGCAUCGCCGAGAACAUCGCCUACGGAGAUAACAGCAGGGUGGU | |
| | GAGCCAGGAUGAGAUCGUGAGCGCCGCAAAAGCCGCCAACAUCCACCCCUUCAUUGAGACC | |
| | CUGCCACACAAGUACGAGACCAGAGUGGGCGACAAGGGCACCCAGCUGUCAGGAGGACAGA | |
| | AGCAGCGUAUCGCCAUCGCCAGAGCCCUGAUUCGGCAGCCCCAGAUUCUGCUGCUGGACGA | |
| | GGCUACAAGCGCUCUGGACACCGAGUCCGAAAAGGUGGUGCAGGAGGCACUUGACAAGGCC | |
| | AGAGAGGGCAGAACCUGCAUAGUGAUUGCCCACAGACUGAGCACCAUUCAAAACGCCGACC | |
| | UGAUCGUGGUUUUCCAGAAUGGGCGGGUUAAGGAGCAUGGCACCCACCAGCAACUGCUGGC | |
| | CCAGAAGGGCAUCUAUUUCAGCAUGGUGAGCGUGCAGGCCGGCACACAGAAUCUGGACUAC | |
| | AAGGACGACGACGACAAG | |
| 3′ UTR | UGAUAAUAGGCUGGAGCCUCGGUGGCCAUGCUUCUUGCCCCUUGGGCCUCCCCCCAGCCCC | 172 |
| | UCCUCCCCUUCCUGCACCCGUACCCCCUCCAUAAAGUAGGAAACACUACAGUGGUCUUUGA | |
| | AUAAAGUCUGAGUGGGCGGC | |
| ELP- | MDLEAAKNGTAWRPTSAEGDFELGISSKQKRKKTKTVKMIGVLTLFRYSDWQDKLFMSLGT | 131 |
| hPFIC3- | IMAIAHGSGLPLMMIVFGEMTDKFVDTAGNFSFPVNFSLSLLNPGKILEEEMTRYAYYYSG | |
| 04-002 - | LGAGVLVAAYIQVSFWTLAAGRQIRK1RQKFFHAILRQEIGWFDINDTTELNTRLTDDISK | |
| amino acid | ISEGIGDKVGMFFQAVATFFAGFIVGFIRGWKLTLVIMAISPILGLSAAVWAKILSAFSDK | |
| | ELAAYAKAGAVAEEALGAIRTVIAFGGQNKELERYQKHLENAKEIGIKKAISANISMGIAF | |
| | LLIYASYALAFWYGSTLVISKEYTIGNAMTVFFSILIGAFSVGQAAPCIDAFANARGAAYV | |
| | IFDIIDNNPKIDSFSERGHKPDS1KGNLEFNDVHFSYPSRANVKILKGLNLKVQSGQTVAL | |
| | VGSSGCGKSTTVQLIQRLYDPDEGTINIDGQDIRNFNVNYLREIIGVVSQEPVLFSTTIAE | |
| | NICYGRGNVTMDEIKKAVKEANAYEFIMKLPQKFDTLVGERGAQLSGGQKQRIAIARALVR | |
| | NPKILLLDEATSALDTESEAEVQAALDKAREGRTTIVIAHRLSTVRNADVIAGFEDGVIVE | |
| | QGSHSELMKKEGVYFKLVNMQTSGSQIQSEEFELNDEKAATRMAPNGWKSRLFRHSTQKNL | |
| | KNSQMCQKSLDVETDGLEANVPPVSFLKVLKLNKTEWPYFVVGTVCAIANGGLQPAFSVIE | |
| | SEIIAIFGPGDDAVKQQKCNIFSLIFLFLGIISFFTFFLQGFTFGKAGEILTRRLRSMAFK | |
| | AMLRQDMSWFDDHKNSTGALSTRLATDAAQVQGATGTRLALIAQNIANLGTGIIISFIYGW | |
| | QLTLLLLAVVPIIAVSGIVEMKLLAGNAKRDKKELEAAGKIATEAIEN1RTVVSLTQERKF | |
| | ESMYVEKLYGPYRNSVQKAHIYGITFSISQAFMYFSYAGCFRFGAYLIVNGHMRFRDVILV | |
| | FSAIVFGAVALGHASSFAPDYAKAKLSAAHLFMLFERQPLIDSYSEEGLKPDKFEGNITFN | |
| | EVVFNYPTRANVPVLQGLSLEVKKGQTLALVGSSGCGKSTVVQLLERFYDPLAGTVLLDGQ | |
| | EAKKLNVQWLRAQLGIVSQEPILFDCSIAENIAYGDNSRVVSQDEIVSAAKAANIETPFIE | |
| | TLPHKYETRVGDKGTQLSGGQKQRIAIARALIRQPQILLLDEATSALDTESEKVVQEALDK | |
| | AREGRTCIVIAHRLSTIQNADLIVVFQNGRVKEHGTHQQLLAQKGIYFSMVSVQAGTQNLD | |
| | YKDDDDK | |

SEQ ID NO: 132 includes, from 5′ to 3′, 5′ UTR (SEQ ID NO: 12),
ORF (SEQ ID NO: 253), 3′ UTR (SEQ ID NO: 172)

| | | |
|---|---|---|
| 5′ UTR | GGGAAAUAAGAGAGAAAAGAAGAGUAAGAAGAAAUAUAAGAGCCACC | 12 |
| ORF | AUGGACCUGGAGGCAGCCAAGAACGGCACCGCUUGGAGGCCGACAUCAGCCGAGGGAGACU | 253 |
| (excluding | UCGAACUGGGAAUCUCCAGUAAACAAAAGAGAAAGAAGACCAAGACAGUGAAAAUGAUCGG | |
| the step | AGUGCUGACACUGUUCAGGUACUCCGACUGGCAGGACAAGCUCUUUAUGUCCCUCGGCACC | |
| codon) | AUCAUGGCCAUUGCUCACGGCAGCGGCCUGCCUUUAAUGAUGAUCGUUUUCGGGGAGAUGA | |
| | CCGACAAAUUCGUGGAUACAGCCGGAAACUUCUCGUUCCCCGUGAACUUUAGCCUGAGCCU | |
| | GCUGAAUCCUGGGAAAAUCCUGGAGGAGGAAAUGACCAGGUACGCCUACUACUACAGCGGC | |
| | CUGGGGGCUGGCGUGCUGGUGGCCGCCUACAUCCAGGUGUCCUUCUGGACUCUGGCCGCCG | |
| | GCAGACAGAUCAGGAAGAUCAGACAGAAGUUCUUCCACGCUAUUCUGAGGCAGGAAAUUGG | |
| | GUGGUUCGACAUCAACGACACUACCGAGCUUAACACGAGACUGACCGACGACAUUAGCAAG | |
| | AUCUCUGAAGGCAUCGGUGAUAAGGUGGGCAUGUUCUUCCAAGCCGUGGCCACCUUUUUCG | |
| | CAGGGUUCAUCGUGGGAUUUAUCCGGGGCUGGAAGCUUACCCUGGUCAUCAUGGCUAUCAG | |
| | CCCGAUUCUGGGCCUCAGCGCCGCAGUUUGGGCCAAGAUCCUGUCCGCUUUCUCCGACAAG | |
| | GAGCUCGCCGCCUACGCCAAGGCUGGUGCAGUGGCUGAGGAGGCCCUUGGAGCCAUUCGUA | |
| | CCGUGAUCGCCUUUGGCGGCCAGAACAAAGAGCUAGAGAGAUACCAAAAACACUUGGAGAA | |
| | CGCCAAGGAGAUCGGCAUUAAGAAGGCCAUCUCUGCCAACAUUUCCAUGGGGAUCGCCUUC | |
| | CUGCUGAUCUACGCCAGCUACGCCCUGGCUUUUUGGUACGGCAGUACGCUGGUGAUUAGCA | |
| | AGGAGUACACCAUCGGCAACGCCAUGACCGUGUUUUUCUCCAUUCUCAUCGGAGCAUUCUC | |
| | CGUGGGCCAGGCUGCCCCCUGCAUCGACGCGUUCGCCAAUGCCAGAGGCGCCGCCUAUGUG | |
| | AUUUUCGACAUCAUCGACAAUAACCCAAAGAUCGACAGUUUCUCUGAACGUGGACACAAAC | |
| | CAGACAGCAUCAAAGGAAAUCUGGAGUUCAACGACGUGCACUUCAGCUACCCAUCCAGGGC | |
| | CAACGUGAAGAUUCUGAAGGGCUUAAACCUGAAGGUGCAGAGUGGACAGACCGUGGCCCUG | |
| | GUGGGGUCUUCUGGCUGCGGCAAGAGCACCACCGUGCAGCUCAUUCAGAGACUUUAUGACC | |
| | CCGAUGAGGGCACUAUAAACAUCGAUGGCCAGGACAUCAGGAACUUCAAUGUGAACUACUU | |
| | AAGGGAAAUUAUCGGCGUGGUGAGCCAGGAGCCCGUGCUGUUCUCUACCACGAUUGCAGAG | |
| | AAUAUCUGCUACGGGAGAGGCAACGUGACCAUGGACGAAAUCAAAAAAGCUGUAAAAGAGG | |
| | CUAACGCUUACGAGUUCAUUAUGAAACUACCCCAGAAGUUCGAUACCCUCGUGGGGGAGAG | |
| | GGGUGCACAGCUGAGCGGUGGCCAGAAGCAGAGGAUCGCCAUAGCAAGAGCCCUGGUGAGA | |
| | AACCCCAAAAUCCUCCUUUUGGAUGAGGCCACCUCCGCCCUCGACACCGAGAGCGAAGCCG | |
| | AGGUGCAGGCCGCCCUCGACAAGGCCAGGGAGGGCCGCACCACCAUUGUGAUCGCCCACAG | |
| | GCUGAGCACCGUGAGAAACGCCGACGUGAUUGCCGGAUUCGAGGACGGCGUGAUCGUGGAG | |
| | CAGGGCAGCCACAGCGAGCUCAUGAAAAAGGAAGGCGUCUACUUCAAACUGGUGAAUAUGC | |
| | AGACCUCGGGUAGCCAAAUCCAGUCCGAGGAGUUUGAGUUAAACGACGAGAAGGCCGCCAC | |
| | CCGGAUGGCCCCCAAUGGGUGGAAGAGCCGCCUGUUUAGGCACUCAACCCAAAAGAACCUG | |
| | AAGAACUCCCAGAUGUGUCAGAAAUCACUGGACGUGGAAACCGACGGGCUGGAAGCUAACG | |
| | UGCCUCCCGUGAGUUUCCUGAAGGUGCUGAAGCUGAACAAGACGGAGUGGCCCUAUUUUGU | |
| | CGUUGGAACAGUGUGCGCAAUCGCCAACGGCGGCCUCCAGCCGGCAUUUAGCGUGAUUUUC | |
| | AGCGAGAUCAUCGCCAUAUUCGGCCCUGGGGAUGACGCUGUCAAGCAGCAGAAAUGCAACA | |
| | UCUUCAGCCUAAUAUUUCUCUUUCUGGGAAUUAUCAGCUUCUUCACCUUCUUCCUGCAGGG | |
| | GUUUACCUUCGGAAAAGCCGGCGAGAUCCUCACCCGCAGACUGAGAUCCAUGGCCUUCAAG | |
| | GCCAUGCUGAGGCAGGAUAUGUCCUGGUUCGAUGACCACAAGAACAGCACCGGCGCCCUGA | |
| | GCACCAGGCUGGCCACUGAUGCCGCUCAGGUCCAGGGUGCUACAGGCACCCGCCUUGCCCU | |
| | GAUUGCCCAGAACAUUGCUAACCUGGGGACCGGGAUCAUCAUCAGCUUUAUCUACGGGUGG | |
| | CAGCUGACCCUCUUACUGCUGGCCGUGGUGCCAAUCAUCGCCGUGAGCGGGAUCGUGGAGA | |
| | UGAAGCUGCUGGCCGGAAAUGCUAAGAGAGAUAAGAAGGAGCUGGAGGCCGCCGGAAAGAU | |
| | CGCCACAGAGGCCAUCGAAAACAUUAGAACUGUAGUGAGCCUGACCCAGGAGAGAAAGUUU | |
| | GAGAGCAUGUACGUGGAGAAGCUCUACGGACCCUACAGGAACUCCGUGCAGAAGGCACACA | |
| | UCUACGGCAUCACUUUCUCGAUUAGCCAGGCCUUCAUGUACUUUAGCUAUGCCGGUUGCUU | |
| | CAGGUUUGGUGCUUACCUGAUCGUCAAUGGCCACAUGAGGUUUAGAGACGUCAUCCUGGUG | |
| | UUUAGCGCCAUCGUCUUCGGAGCUGUGGCUCUGGGCCACGCCUCCAGCUUCGCCCCUGACU | |
| | ACGCCAAGGCCAAGCUGAGCGCCGCCCAUCUGUUCAUGCUGUUUGAACGUCAGCCACUGAU | |
| | CGACUCAUAUAGCGAGGAAGGGCUGAAACCCGAUAAAUUCGAGGGAAAUAUUACAUUCAAU | |
| | GAGGUUGUAUUCAACUACCCUACCAGAGCCAACGUGCCUGUGCUGCAGGGCCUGUCCCUGG | |
| | AGGUGAAAAAGGGACAGACCCUGGCUCUGGUGGGCUCUAGCGGCUGUGGCAAGAGCACCGU | |
| | GGUGCAGCUGCUGGAGAGAUUUUACGAUCCUCUGGCCGGCACAGUGCUGCUGGACGGCCAG | |
| | GAGGCUAAAAAACUGAAUGUGCAGUGGCUGCGGGCUCAACUGGGCAUCGUGUCCCAGGAGC | |
| | CCAUACUGUUCGAUUGUAGCAUCGCCGAAAAUAUUGCCUACGGAGACAAUAGCAGAGUGGU | |
| | UUCACAAGAUGAGAUUGUAAGUGCCGCCAAGGCCGCCAACAUCCACCCCUUCAUCGAAACA | |
| | CUCCCCCACAAGUACGAGACAAGGGUUGGAGAUAAGGGCACCCAGCUGUCCGGUGGCCAGA | |
| | AACAGAGAAUCGCCAUCGCCCGGGCUCUGAUCAGACAGCCUCAGAUCCUCCUGUUGGACGA | |
| | GGCUACUUCCGCCUUGGACACCGAAUCGGAGAAAGUGGUGCAGGAGGCCCUCGACAAGGCU | |
| | AGAGAGGGAAGAACCUGUAUUGUGAUCGCGCAUAGGCUCAGCACCAUCCAGAAUGCCGAUC | |
| | UGAUCGUCGUGUUCCAAAACGGACGCGUGAAGGAGCACGGCACCCACCAGCAAUUGCUCGC | |
| | ACAGAAAGGGAUCUACUUCAGCAUGGUGUCCGUGCAGGCAGGCACCCAGAAUCUG | |
| 3′ UTR | UGAUAAUAGGCUGGAGCCUCGGUGGCCAUGCUUCUUGCCCCUUGGGCCUCCCCCCAGCCCC | 172 |
| | UCCUCCCCUUCCUGCACCCGUACCCCCUCCAUAAAGUAGGAAACACUACAGUGGUCUUUGA | |
| | AUAAAGUCUGAGUGGGCGGC | |
| ELP- | MDLEAAKNGTAWRPTSAEGDFELGISSKQKRKKTKTVKMIGVLTLFRYSDWQDKLFMSLGT | 133 |
| hPFIC3- | IMAIAHGSGLPLMMIVFGEMTDKFVDTAGNFSFPVNFSLSLLNPGKILEEEMTRYAYYYSG | |
| 03-003 - | LGAGVLVAAYIQVSFWTLAAGRQIRK1RQKFFHAILRQEIGWFDINDTTELNTRLTDDISK | |
| amino acid | ISEGIGDKVGMFFQAVATFFAGFIVGFIRGWKLTLVIMAISPILGLSAAVWAKILSAFSDK | |
| | ELAAYAKAGAVAEEALGAIRTVIAFGGQNKELERYQKHLENAKEIGIKKAISANISMGIAF | |
| | LLIYASYALAFWYGSTLVISKEYTIGNAMTVFFSILIGAFSVGQAAPCIDAFANARGAAYV | |
| | IFDIIDNNPKIDSFSERGHKPDS1KGNLEFNDVHFSYPSRANVKILKGLNLKVQSGQTVAL | |
| | VGSSGCGKSTTVQLIQRLYDPDEGTINIDGQDIRNFNVNYLREIIGVVSQEPVLFSTTIAE | |
| | NICYGRGNVTMDEIKKAVKEANAYEFIMKLPQKFDTLVGERGAQLSGGQKQRIAIARALVR | |
| | NPKILLLDEATSALDTESEAEVQAALDKAREGRTTIVIAHRLSTVRNADVIAGFEDGVIVE | |
| | QGSHSELMKKEGVYFKLVNMQTSGSQIQSEEFELNDEKAATRMAPNGWKSRLFRHSTQKNL | |
| | KNSQMCQKSLDVETDGLEANVPPVSFLKVLKLNKTEWPYFVVGTVCAIANGGLQPAFSVIE | |
| | SEIIAIFGPGDDAVKQQKCNIFSLIFLFLGIISFFTFFLQGFTFGKAGEILTRRLRSMAFK | |
| | AMLRQDMSWFDDHKNSTGALSTRLATDAAQVQGATGTRLALIAQNIANLGTGIIISFIYGW | |
| | QLTLLLLAVVPIIAVSGIVEMKLLAGNAKRDKKELEAAGKIATEAIEN1RTVVSLTQERKF | |
| | ESMYVEKLYGPYRNSVQKAHIYGITFSISQAFMYFSYAGCFRFGAYLIVNGHMRFRDVILV | |
| | FSAIVFGAVALGHASSFAPDYAKAKLSAAHLFMLFERQPLIDSYSEEGLKPDKFEGNITFN | |
| | EVVFNYPTRANVPVLQGLSLEVKKGQTLALVGSSGCGKSTVVQLLERFYDPLAGTVLLDGQ | |
| | EAKKLNVQWLRAQLGIVSQEPILFDCSIAENIAYGDNSRVVSQDEIVSAAKAANIETPFIE | |
| | TLPHKYETRVGDKGTQLSGGQKQRIAIARALIRQPQILLLDEATSALDTESEKVVQEALDK | |
| | AREGRTCIVIAHRLSTIQNADLIVVFQNGRVKEHGTHQQLLAQKGIYFSMVSVQAGTQNL | |

SEQ ID NO: 134 includes, from 5′ to 3′, 5′ UTR (SEQ ID NO: 12),
ORF (SEQ ID NO: 254), 3′ UTR (SEQ ID NO: 172)

| | | |
|---|---|---|
| 5′ UTR | GGGAAAUAAGAGAGAAAAGAAGAGUAAGAAGAAAUAUAAGAGCCACC | 12 |
| ORF | AUGGACCUAGAGGCCGCGAAGAACGGCACCGCCUGGAGACCUACCUCCGCCGAGGGGGACU | 254 |
| (excluding | UCGAGUUGGGUAUCAGCUCUAAACAGAAGAGGAAGAAAACCAAGACUGUGAAAAUGAUAGG | |
| the stop | CGUGCUGACCCUCUUCAGAUACUCCGACUGGCAGGACAAGCUGUUCAUGUCCCUCGGCACC | |
| codon) | AUCAUGGCUAUCGCCCAUGGAUCUGGACUGCCCCUUAUGAUGAUCGUUUUCGGGGAGAUGA | |
| | CCGACAAGUUCGUGGACACCGCAGGAAACUUCUCCUUCCCCGUGAACUUCAGCUUGAGCCU | |
| | GUUGAACCCAGGCAAGAUACUCGAGGAGGAGAUGACCCGCUACGCCUACUACUACAGCGGC | |
| | CUCGGCGCCGGGGUGCUGGUGGCAGCUUAUAUCCAGGUGAGCUUCUGGACGCUGGCUGCCG | |
| | GCCGACAGAUUCGCAAGAUCCGCCAGAAAUUCUUCCACGCCAUCCUUAGGCAGGAGAUCGG | |
| | CUGGUUCGAUAUCAACGACACCACAGAGCUGAAUACUCGGCUAACCGACGACAUUAGCAAG | |
| | AUCAGCGAGGGAAUCGGCGACAAGGUGGGCAUGUUUUUCCAAGCUGUGGCUACCUUCUUCG | |
| | CCGGCUUCAUCGUAGGAUUCAUUAGAGGAUGGAAGCUGACCCUGGUGAUCAUGGCUAUCAG | |
| | CCCAAUCUUGGGCCUGUCCGCUGCCGUGUGGGCCAAAAUUCUGUCUGCGUUUUCAGAUAAG | |
| | GAGCUGGCCGCCUACGCCAAGGCAGGCGCUGUCGCCGAGGAGGCUCUGGGCGCCAUCAGAA | |
| | CUGUGAUCGCCUUCGGUGGACAGAACAAGGAGUUGGAAAGAUAUCAGAAGCACUUGGAGAA | |
| | CGCCAAGGAGAUCGGCAUCAAGAAGGCCAUCUCUGCCAAUAUCAGCAUGGGCAUCGCGUUU | |
| | CUGCUGAUUUACGCCAGCUACGCACUGGCCUUCUGGUAUGGCUCUACCUUGGUCAUCAGCA | |
| | AGGAGUACACCAUCGGCAACGCUAUGACUGUGUUCUUCUCCAUUCUGAUCGGCGCAUUCAG | |
| | CGUGGGACAGGCCGCCCCUUGCAUCGACGCUUUCGCCAACGCCAGGGGCGCCGCCUACGUC | |
| | AUCUUUGACAUUAUCGACAACAACCCCAAAAUCGACUCUUUCAGCGAAAGAGGCCACAAAC | |
| | CCGACUCCAUCAAGGGUAACCUGGAGUUCAACGAUGUCCAUUUCUCCUACCCUUCUAGGGC | |
| | CAACGUGAAGAUCCUGAAGGGCCUAAAUCUGAAGGUGCAGUCAGGACAGACCGUCGCUCUG | |
| | GUGGGUAGCUCCGGCUGCGGCAAGUCCACCACAGUGCAGCUUAUCCAGAGGUUGUAUGACC | |
| | CUGAUGAAGGCACCAUUAAUAUCGACGGCCAGGACAUCAGGAAUUUUAAUGUGAAUUACCU | |
| | GAGAGAGAUUAUCGGCGUGGUCAGCCAGGAGCCCGUCCUAUUCAGCACAACAAUAGCCGAA | |
| | AACAUCUGUUAUGGCAGGGGGAACGUCACAAUGGAUGAGAUCAAGAAGGCCGUGAAAGAGG | |
| | CUAACGCAUACGAAUUUAUCAUGAAGCUCCCUCAGAAGUUCGACACUUUGGUGGGCGAGAG | |
| | AGGCGCCCAACUGAGCGGCGGCCAGAAGCAGAGAAUCGCAAUCGCUAGAGCCCUCGUCCGG | |
| | AAUCCAAAGAUCCUGCUGCUCGACGAGGCCACAAGCGCUCUUGACACCGAGUCAGAGGCCG | |
| | AGGUGCAAGCUGCCCUGGACAAAGCCCGGGAGGGCAGAACCACCAUCGUGAUUGCCCACAG | |
| | GCUGUCCACCGUUAGAAAUGCGGACGUCAUCGCCGGGUUCGAGGACGGGGUGAUUGUGGAG | |
| | CAGGGCAGCCAUAGCGAGCUCAUGAAGAAGGAGGGAGUGUACUUCAAGCUGGUCAAUAUGC | |
| | AGACCAGUGGCUCUCAGAUCCAGAGCGAGGAGUUCGAGCUGAACGACGAGAAGGCCGCCAC | |
| | UAGAAUGGCCCCCAAUGGCUGGAAAAGCAGACUCUUCAGACACAGCACGCAGAAGAACCUG | |
| | AAGAACAGUCAGAUGUGCCAGAAGAGUCUGGACGUCGAGACCGACGGCCUGGAGGCCAACG | |
| | UGCCCCCCGUCAGUUUCCUGAAGGUGCUGAAACUAAACAAAACUGAGUGGCCUUACUUCGU | |
| | UGUAGGAACCGUCUGCGCUAUCGCCAACGGGGGACUGCAGCCCGCCUUUAGCGUGAUCUUU | |
| | AGCGAAAUCAUCGCCAUCUUUGGCCCCGGCGACGACGCUGUGAAGCAGCAGAAGUGCAAUA | |
| | UCUUCUCUUUGAUCUUUCUGUUCCUGGGCAUCAUCUCAUUCUUUACAUUUUUUCUCCAGGG | |
| | CUUCACCUUCGGCAAGGCCGGAGAGAUUCUGACCAGAAGACUGAGAAGCAUGGCCUUCAAG | |
| | GCUAUGCUGAGGCAGGACAUGAGCUGGUUUGACGAUCACAAGAACAGCACUGGCGCCCUGA | |
| | GCACAAGACUGGCUACCGACGCCGCACAGGUGCAGGGCGCCACCGGGACUAGGUUGGCUCU | |
| | GAUCGCCCAGAAUAUCGCCAAUCUGGGCACUGGCAUUAUUAUUAGCUUCAUCUAUGGCUGG | |
| | CAGCUGACCCUGCUGCUGCUGGCCGUUGUGCCCAUCAUCGCUGUGUCAGGCAUCGUGGAAA | |
| | UGAAGCUCCUCGCUGGCAACGCCAAAAGGGACAAGAAGGAGCUGGAGGCCGCAGGCAAGAU | |
| | UGCCACCGAGGCCAUCGAGAAUAUCCGCACCGUCGUGAGCUUGACCCAGGAAAGAAAGUUC | |
| | GAGAGCAUGUACGUAGAGAAACUGUACGGACCCUACCGCAAUUCCGUACAGAAGGCUCAUA | |
| | UCUACGGGAUCACUUUUUCCAUCUCCCAGGCCUUCAUGUACUUUAGCUACGCCGGCUGCUU | |
| | UAGAUUCGGUGCCUACUUGAUCGUGAACGGACACAUGCGAUUCAGAGAUGUGAUUCUGGUG | |
| | UUUAGCGCUAUUGUGUUCGGCGCCGUCGCCCUCGGGCACGCCAGCAGCUUCGCCCCCGACU | |
| | ACGCGAAGGCUAAGCUCUCAGCUGCGCACCUGUUCAUGCUGUUCGAGCGCCAGCCCCUCAU | |
| | CGACUCCUACAGCGAAGAGGGAUUAAAGCCGGAUAAAUUCGAGGGCAACAUCACCUUUAAC | |
| | GAGGUGGUAUUUAACUAUCCAACCCGCGCCAACGUGCCGGUUCUGCAAGGACUCAGCCUUG | |
| | AGGUCAAGAAGGGCCAGACCCUUGCGCUCGUCGGCUCCAGCGGCUGCGGCAAAAGCACCGU | |
| | CGUGCAGCUGCUGGAGAGAUUCUAUGACCCCCUGGCCGGGACUGUGCUGCUGGACGGCCAG | |
| | GAGGCUAAGAAGCUGAACGUGCAGUGGCUCCGGGCUCAGCUGGGAAUCGUGAGCCAGGAAC | |
| | CGAUACUGUUUGACUGCAGCAUCGCUGAGAACAUCGCCUAUGGAGAUAACAGCAGGGUGGU | |
| | GUCCCAGGAUGAAAUUGUGAGCGCUGCCAAAGCCGCCAACAUCCACCCUUUCAUCGAGACU | |
| | CUGCCCCAUAAGUACGAGACCAGAGUGGGCGACAAAGGUACACAGCUGUCCGGAGGGCAGA | |
| | AGCAGAGAAUUGCCAUCGCCAGGGCCUUGAUUAGACAGCCGCAGAUCCUUCUGCUGGACGA | |
| | GGCCACUUCUGCCCUGGACACCGAAUCCGAGAAGGUUGUGCAGGAAGCCCUGGACAAGGCA | |
| | AGAGAGGGCCGUACCUGCAUCGUGAUCGCCCACAGACUGAGCACGAUCCAGAACGCAGAUC | |
| | UGAUCGUCGUGUUCCAGAACGGAAGAGUUAAAGAGCAUGGGACACACCAGCAGCUCCUGGC | |
| | UCAGAAGGGCAUCUAUUUCUCCAUGGUGAGCGUGCAGGCCGGCACCCAGAACCUG | |
| 3′ UTR | UGAUAAUAGGCUGGAGCCUCGGUGGCCAUGCUUCUUGCCCCUUGGGCCUCCCCCCAGCCCC | 172 |
| | UCCUCCCCUUCCUGCACCCGUACCCCCUCCAUAAAGUAGGAAACACUACAGUGGUCUUUGA | |
| | AUAAAGUCUGAGUGGGCGGC | |
| ELP- | MDLEAAKNGTAWRPTSAEGDFELGISSKQKRKKTKTVKMIGVLTLFRYSDWQDKLFMSLGT | 135 |
| hPFIC3- | IMAIAHGSGLPLMMIVFGEMTDKFVDTAGNFSFPVNFSLSLLNPGKILEEEMTRYAYYYSG | |
| 03-005 - | LGAGVLVAAYIQVSFWTLAAGRQIRK1RQKFFHAILRQEIGWFDINDTTELNTRLTDDISK | |
| amino acid | ISEGIGDKVGMFFQAVATFFAGFIVGFIRGWKLTLV1MAISPILGLSAAVWAKILSAFSDK | |
| | ELAAYAKAGAVAEEALGAIRTVIAFGGQNKELERYQKHLENAKEIGIKKAISANISMGIAF | |
| | LLIYASYALAFWYGSTLVISKEYTIGNAMTVFFSILIGAFSVGQAAPCIDAFANARGAAYV | |
| | IFDIIDNNPKIDSFSERGHKPDS1KGNLEFNDVHFSYPSRANVKILKGLNLKVQSGQTVAL | |
| | VGSSGCGKSTTVQLIQRLYDPDEGTINIDGQDIRNFNVNYLREIIGVVSQEPVLFSTTIAE | |
| | NICYGRGNVTMDE1KKAVKEANAYEFIMKLPQKFDTLVGERGAQLSGGQKQRIAIARALVR | |
| | NPKILLLDEATSALDTESEAEVQAALDKAREGRTTIVIAHRLSTVRNADVIAGFEDGVIVE | |
| | QGSHSELMKKEGVYFKLVNMQTSGSQIQSEEFELNDEKAATRMAPNGWKSRLFRHSTQKNL | |
| | KNSQMCQKSLDVETDGLEANVPPVSFLKVLKLNKTEWPYFVVGTVCAIANGGLQPAFSVIF | |
| | SEIIAIFGPGDDAVKQQKCNIFSLIFLFLGIISFFTFFLQGFTFGKAGEILTRRLRSMAFK | |
| | AMLRQDMSWFDDHKNSTGALSTRLATDAAQVQGATGTRLALIAQNIANLGTGIIISFIYGW | |
| | QLTLLLLAVVPIIAVSGIVEMKLLAGNAKRDKKELEAAGKIATEAIEN1RTVVSLTQERKF | |
| | ESMYVEKLYGPYRNSVQKAHIYGITFSISQAFMYFSYAGCFRFGAYLIVNGHMRFRDVILV | |
| | FSAIVFGAVALGHASSFAPDYAKAKLSAAHLFMLFERQPLIDSYSEEGLKPDKFEGNITFN | |
| | EVVFNYPTRANVPVLQGLSLEVKKGQTLALVGSSGCGKSTVVQLLERFYDPLAGTVLLDGQ | |
| | EAKKLNVQWLRAQLGIVSQEPILFDCSIAENIAYGDNSRVVSQDEIVSAAKAANIHPFIET | |
| | LPHKYETRVGDKGTQLSGGQKQRIAIARALIRQPQILLLDEATSALDTESEKVVQEALDKA | |
| | REGRTCIVIAHRLSTIQNADLIVVFQNGRVKEHGTHQQLLAQKGIYFSMVSVQAGTQNL | |

SEQ ID NO: 136 includes, from 5′ to 3′, 5′ UTR (SEQ ID NO: 12),
ORF (SEQ ID NO: 255), 3′ UTR (SEQ ID NO: 172

| | | |
|---|---|---|
| 5′ UTR | GGGAAAUAAGAGAGAAAAGAAGAGUAAGAAGAAAUAUAAGAGCCACC | 12 |
| ORF | AUGGAUUUAGAAGCCGCCAAGAACGGAACCGCCUGGCGUCCCACCAGCGCCGAGGGCGAUU | 255 |
| (excluding | UCGAACUUGGCAUCUCAAGCAAACAAAAGAGGAAAAAAACAAAGACCGUGAAGAUGAUAGG | |
| the stop | CGUUCUCACCCUGUUCAGGUACAGCGAUUGGCAGGAUAAGCUGUUCAUGUCCCUGGGUACA | |
| codon) | AUUAUGGCCAUCGCCCAUGGCUCCGGCCUGCCGCUGAUGAUGAUCGUUUUUGGAGAGAUGA | |
| | CCGACAAAUUUGUGGAUACCGCCGGGAACUUCUCAUUCCCUGUGAACUUCAGCCUGAGCCU | |
| | GCUGAACCCUGGCAAGAUCCUGGAGGAAGAGAUGACCAGAUACGCCUACUACUACUCUGGC | |
| | CUGGGUGCGGGAGUCCUGGUUGCCGCUUACAUUCAGGUGAGCUUUUGGACCCUGGCCGCCG | |
| | GCAGACAGAUCCGUAAAAUCAGGCAAAAGUUCUUCCACGCCAUCCUCAGACAGGAAAUCGG | |
| | CUGGUUCGACAUCAAUGACACCACCGAGCUGAACACAAGGCUGACAGACGAUAUCUCUAAG | |
| | AUCUCAGAAGGCAUCGGAGAUAAGGUGGGCAUGUUCUUCCAGGCCGUCGCCACCUUUUUCG | |
| | CCGGCUUCAUCGUGGGCUUCAUCCGCGGAUGGAAACUGACCCUUGUGAUCAUGGCCAUCAG | |
| | CCCAAUCCUGGGCCUGAGCGCCGCCGUGUGGGCCAAGAUCCUGUCUGCUUUUAGCGACAAG | |
| | GAGCUGGCCGCGUACGCUAAGGCCGGCGCCGUGGCCGAGGAGGCUCUGGGCGCCAUCAGAA | |
| | CCGUGAUCGCUUUUGGGGGACAAAACAAGGAGCUGGAACGGUACCAGAAGCACCUGGAGAA | |
| | CGCUAAGGAGAUCGGGAUCAAGAAGGCCAUCUCCGCUAAUAUCAGCAUGGGGAUCGCCUUC | |
| | UUACUGAUAUACGCUAGCUACGCCCUGGCCUUUUGGUACGGCAGCACCCUGGUGAUUUCCA | |
| | AGGAGUACACCAUUGGCAACGCCAUGACCGUGUUCUUCUCUAUCCUCAUCGGUGCUUUUUC | |
| | CGUUGGCCAGGCCGCCCCCUGCAUCGACGCCUUCGCCAACGCUAGAGGCGCCGCCUACGUC | |
| | AUCUUCGAUAUCAUCGACAACAAUCCAAAGAUUGACAGCUUCAGCGAGCGGGGCCAUAAGC | |
| | CAGACUCAAUCAAGGGGAACCUUGAAUUCAAUGACGUCCAUUUCUCCUACCCCUCUCGAGC | |
| | CAAUGUGAAGAUACUGAAGGGGCUGAACCUGAAGGUGCAGUCCGGUCAGACCGUUGCCCUG | |
| | GUGGGCAGCUCCGGAUGUGGGAAGUCUACCACCGUACAGUUGAUCCAGCGACUGUACGACC | |
| | CAGACGAAGGCACCAUCAACAUUGAUGGCCAGGACAUCCGGAAUUUUAAUGUGAACUACCU | |
| | GAGAGAGAUUAUCGGCGUGGUCUCCCAGGAACCCGUCCUGUUCUCCACAACUAUCGCCGAG | |
| | AACAUCUGUUACGGAAGAGGAAACGUGACCAUGGACGAGAUAAAGAAGGCCGUCAAAGAGG | |
| | CAAAUGCCUACGAGUUCAUUAUGAAGCUGCCUCAGAAGUUCGACACCCUGGUCGGCGAGAG | |
| | AGGGGCCCAGCUGUCUGGGGGCCAGAAGCAGAGAAUCGCCAUCGCCAGGGCUCUCGUCCGG | |
| | AACCCCAAGAUUCUCCUCCUGGAUGAGGCCACCAGCGCCCUGGACACCGAAAGCGAAGCCG | |
| | AGGUCCAGGCCGCCCUGGACAAGGCCCGAGAGGGCAGGACCACCAUCGUGAUCGCCCAUAG | |
| | GUUGAGCACCGUGAGGAAUGCCGACGUGAUCGCUGGAUUCGAGGACGGCGUUAUCGUGGAG | |
| | CAGGGCUCUCACUCGGAGCUGAUGAAAAAAGAGGGCGUGUACUUCAAACUCGUGAACAUGC | |
| | AGACUUCCGGAUCACAGAUCCAGUCCGAGGAGUUCGAGCUCAACGAUGAGAAGGCUGCCAC | |
| | UAGAAUGGCACCAAACGGCUGGAAGUCCCGUCUUUUCAGACACUCUACGCAGAAGAAUCUG | |
| | AAGAACAGCCAGAUGUGCCAGAAGUCUCUGGACGUGGAAACGGACGGCCUGGAAGCCAACG | |
| | UCCCUCCCGUGUCCUUCCUGAAAGUCCUGAAGCUAAACAAAACAGAGUGGCCUUACUUUGU | |
| | GGUGGGCACUGUUUGCGCCAUCGCCAACGGCGGCCUGCAGCCUGCGUUCAGCGUGAUCUUU | |
| | AGCGAGAUUAUAGCUAUUUUUGGCCCUGGAGACGAUGCUGUGAAGCAACAGAAGUGCAACA | |
| | UCUUUAGUCUUAUCUUCCUUUUCCUCGGAAUCAUCAGCUUUUUCACGUUCUUCCUUCAGGG | |
| | UUUUACCUUUGGCAAGGCCGGAGAGAUACUCACUAGACGCCUGAGAUCAAUGGCUUUUAAG | |
| | GCCAUGCUGAGACAGGACAUGAGCUGGUUCGACGACCACAAGAAUUCUACCGGAGCACUGU | |
| | CCACAAGACUGGCAACCGACGCCGCCCAGGUCCAGGGGGCCACUGGCACCCGGCUGGCCCU | |
| | GAUCGCUCAAAACAUUGCAAACCUGGGAACUGGCAUCAUCAUUAGCUUCAUCUAUGGAUGG | |
| | CAGCUGACACUUCUGCUGCUGGCCGUCGUGCCAAUUAUCGCCGUGAGCGGGAUCGUCGAGA | |
| | UGAAACUCCUCGCUGGGAAUGCUAAGAGGGACAAGAAGGAGCUGGAGGCCGCGGGCAAGAU | |
| | CGCCACUGAGGCUAUCGAGAAUAUCCGCACCGUUGUGAGCUUGACACAGGAGAGAAAGUUC | |
| | GAGAGCAUGUAUGUGGAGAAGCUGUACGGACCAUACAGAAAUUCAGUGCAGAAGGCCCACA | |
| | UCUACGGAAUUACCUUCUCCAUCAGCCAGGCAUUCAUGUACUUUUCUUACGCCGGCUGUUU | |
| | UAGAUUCGGCGCAUACCUGAUCGUGAACGGCCAUAUGAGGUUCAGAGACGUGAUCCUGGUU | |
| | UUCUCCGCCAUAGUGUUUGGCGCUGUCGCUCUGGGCCACGCCAGCUCAUUUGCUCCCGAUU | |
| | AUGCAAAGGCAAAGCUGUCCGCCGCACACCUCUUCAUGCUCUUCGAGCGUCAGCCUCUGAU | |
| | CGACUCCUACUCAGAGGAGGGGCUCAAGCCCGACAAGUUCGAAGGCAACAUCACUUUCAAC | |
| | GAAGUGGUGUUCAACUACCCUACCCGGGCAAACGUGCCUGUGCUGCAGGGCCUGAGCCUGG | |
| | AGGUGAAGAAAGGACAGACCCUGGCUCUGGUAGGCUCAUCCGGAUGCGGCAAAUCAACAGU | |
| | GGUGCAACUGCUCGAGCGGUUCUACGACCCCCUGGCGGGGACCGUUCUCCUGGAUGGCCAG | |
| | GAGGCAAAGAAGCUGAACGUGCAGUGGCUGAGAGCACAGCUGGGGAUUGUGUCCCAGGAAC | |
| | CGAUUCUGUUUGACUGCAGCAUCGCCGAGAACAUCGCCUACGGAGAUAACAGCAGGGUGGU | |
| | GAGCCAGGAUGAGAUCGUGAGCGCCGCAAAAGCCGCCAACAUCCACCCCUUCAUUGAGACC | |
| | CUGCCACACAAGUACGAGACCAGAGUGGGCGACAAGGGCACCCAGCUGUCAGGAGGACAGA | |
| | AGCAGCGUAUCGCCAUCGCCAGAGCCCUGAUUCGGCAGCCCCAGAUUCUGCUGCUGGACGA | |
| | GGCUACAAGCGCUCUGGACACCGAGUCCGAAAAGGUGGUGCAGGAGGCACUUGACAAGGCC | |
| | AGAGAGGGCAGAACCUGCAUAGUGAUUGCCCACAGACUGAGCACCAUUCAAAACGCCGACC | |
| | UGAUCGUGGUUUUCCAGAAUGGGCGGGUUAAGGAGCAUGGCACCCACCAGCAACUGCUGGC | |
| | CCAGAAGGGCAUCUAUUUCAGCAUGGUGAGCGUGCAGGCCGGCACACAGAAUCUG | |
| 3′ UTR | UGAUAAUAGGCUGGAGCCUCGGUGGCCAUGCUUCUUGCCCCUUGGGCCUCCCCCCAGCCCC | 172 |
| | UCCUCCCCUUCCUGCACCCGUACCCCCUCCAUAAAGUAGGAAACACUACAGUGGUCUUUGA | |
| | AUAAAGUCUGAGUGGGCGGC | |
| ELP- | MDLEAAKNGTAWRPTSAEGDFELGISSKQKRKKTKTVKMIGVLTLFRYSDWQDKLFMSLGT | 137 |
| hPFIC3- | IMAIAHGSGLPLMMIVFGEMTDKFVDTAGNFSFPVNFSLSLLNPGKILEEEMTRYAYYYSG | |
| 03-002.2 - | LGAGVLVAAYIQVSFWTLAAGRQIRK1RQKFFHAILRQEIGWFDINDTTELNTRLTDDISK | |
| amino acid | ISEGIGDKVGMFFQAVATFFAGFIVGFIRGWKLTLVIMAISPILGLSAAVWAKILSAFSDK | |
| | ELAAYAKAGAVAEEALGA1RTVIAFGGQNKELERYQKHLENAKEIGIKKAISANISMGIAF | |
| | LLIYASYALAFWYGSTLVISKEYTIGNAMTVFFSILIGAFSVGQAAPCIDAFANARGAAVV | |
| | IFDIIDNNPKIDSFSERGHKPDSIKGNLEFNDVHFSYPSRANVKILKGLNLKVQSGQTVAL | |
| | VGSSGCGKSTTVQLIQRLYDPDEGTINIDGQDIRNFNVNYLREIIGVVSQEPVLFSTTIAE | |
| | NICYGRGNVTMDEIKKAVKEANAYEHMKLPQKFDTLVGERGAQLSGGQKQRIAIARALVRN | |
| | PKILLLDEATSALDTESEAEVQAALDKAREGRTTIVIAHRLSTVRNADVIAGFEDGVIVEQ | |
| | GSHSELMKKEGVYFKLVNMQTSGSQIQSEEFELNDEKAATRMAPNGWKSRLFRHSTQKNLK | |
| | NSQMCQKSLDVETDGLEANVPPVSFLKVLKLNKTEWPYFVVGTVCAIANGGLQPAFSVIFS | |
| | EIIAIFGPGDDAVKQQKCNIFSLIFLFLGIISFFTFFLQGFTFGKAGEILTRRLRSMAFKA | |
| | MLRQDMSWFDDHKNSTGALSTRLATDAAQVQGATGTRLALIAQNIANLGTGIIISFIYGWQ | |
| | LTLLLLAVVPIIAVSGIVEMKLLAGNAKRDKKELEAAGKIATEAIEN1RTVVSLTQERKFE | |
| | SMYVEKLYGPYRNSVQKAHIYGITFSISQAFMYFSVAGCFRFGAYLIVNGHMRFRDVILVF | |
| | SAIVFGAVALGHASSFAPDYAKAKLSAAHLFMLFERQPLIDSYSEEGLKPDKFEGNITFNE | |
| | VVFNYPTRANVPVLQGLSLEVKKGQTLALVGSSGCGKSTVVQLLERFYDPLAGTVLLDGQE | |
| | AKKLNVQWLRAQLGIVSQEPILFDCSIAENIAYGDNSRVVSQDEIVSAAKAANIHPFIETL | |
| | PHKYETRVGDKGTQLSGGQKQRIAIARALIRQPQILLLDEATSALDTESEKVVQEALDKAR | |
| | EGRTCIVIAHRLSTIQNADLIVVFQNGRVKEHGTHQQLLAQKGIYFSMVSVQAGTQNL | |

SEQ ID NO: 138 includes, from 5′ to 3′, 5′ UTR (SEQ ID NO: 12),
ORF (SEQ ID NO: 256), 3′ UTR (SEQ ID NO: 172

| | | |
|---|---|---|
| 5′ UTR | GGGAAAUAAGAGAGAAAAGAAGAGUAAGAAGAAAUAUAAGAGCCACC | 12 |
| ORF | AUGGAUUUAGAAGCCGCCAAGAACGGAACCGCCUGGCGUCCCACCAGCGCCGAGGGCGAUU | 256 |
| (excluding | UCGAACUUGGCAUCUCAAGCAAACAAAAGAGGAAAAAAACAAAGACCGUGAAGAUGAUAGG | |
| the stop | CGUUCUCACCCUGUUCAGGUACAGCGAUUGGCAGGAUAAGCUGUUCAUGUCCCUGGGUACA | |
| codon) | AUUAUGGCCAUCGCCCAUGGCUCCGGCCUGCCGCUGAUGAUGAUCGUUUUUGGAGAGAUGA | |
| | CCGACAAAUUUGUGGAUACCGCCGGGAACUUCUCAUUCCCUGUGAACUUCAGCCUGAGCCU | |
| | GCUGAACCCUGGCAAGAUCCUGGAGGAAGAGAUGACCAGAUACGCCUACUACUACUCUGGC | |
| | CUGGGUGCGGGAGUCCUGGUUGCCGCUUACAUUCAGGUGAGCUUUUGGACCCUGGCCGCCG | |
| | GCAGACAGAUCCGUAAAAUCAGGCAAAAGUUCUUCCACGCCAUCCUCAGACAGGAAAUCGG | |
| | CUGGUUCGACAUCAAUGACACCACCGAGCUGAACACAAGGCUGACAGACGAUAUCUCUAAG | |
| | AUCUCAGAAGGCAUCGGAGAUAAGGUGGGCAUGUUCUUCCAGGCCGUCGCCACCUUUUUCG | |
| | CCGGCUUCAUCGUGGGCUUCAUCCGCGGAUGGAAACUGACCCUUGUGAUCAUGGCCAUCAG | |
| | CCCAAUCCUGGGCCUGAGCGCCGCCGUGUGGGCCAAGAUCCUGUCUGCUUUUAGCGACAAG | |
| | GAGCUGGCCGCGUACGCUAAGGCCGGCGCCGUGGCCGAGGAGGCUCUGGGCGCCAUCAGAA | |
| | CCGUGAUCGCUUUUGGGGGACAAAACAAGGAGCUGGAACGGUACCAGAAGCACCUGGAGAA | |
| | CGCUAAGGAGAUCGGGAUCAAGAAGGCCAUCUCCGCUAAUAUCAGCAUGGGGAUCGCCUUC | |
| | UUACUGAUAUACGCUAGCUACGCCCUGGCCUUUUGGUACGGCAGCACCCUGGUGAUUUCCA | |
| | AGGAGUACACCAUUGGCAACGCCAUGACCGUGUUCUUCUCUAUCCUCAUCGGUGCUUUUUC | |
| | CGUUGGCCAGGCCGCCCCCUGCAUCGACGCCUUCGCCAACGCUAGAGGCGCCGCCUACGUC | |
| | AUCUUCGAUAUCAUCGACAACAAUCCAAAGAUUGACAGCUUCAGCGAGCGGGGCCAUAAGC | |
| | CAGACUCAAUCAAGGGGAACCUUGAAUUCAAUGACGUCCAUUUCUCCUACCCCUCUCGAGC | |
| | CAAUGUGAAGAUACUGAAGGGGCUGAACCUGAAGGUGCAGUCCGGUCAGACCGUUGCCCUG | |
| | GUGGGCAGCUCCGGAUGUGGGAAGUCUACCACCGUACAGUUGAUCCAGCGACUGUACGACC | |
| | CAGACGAAGGCACCAUCAACAUUGAUGGCCAGGACAUCCGGAAUUUUAAUGUGAACUACCU | |
| | GAGAGAGAUUAUCGGCGUGGUCUCCCAGGAACCCGUCCUGUUCUCCACAACUAUCGCCGAG | |
| | AACAUCUGUUACGGAAGAGGAAACGUGACCAUGGACGAGAUAAAGAAGGCCGUCAAAGAGG | |
| | CAAAUGCCUACGAGUUCAUUAUGAAGCUGCCUCAGAAGUUCGACACCCUGGUCGGCGAGAG | |
| | AGGGGCCCAGCUGUCUGGGGGCCAGAAGCAGAGAAUCGCCAUCGCCAGGGCUCUCGUCCGG | |
| | AACCCCAAGAUUCUCCUCCUGGAUGAGGCCACCAGCGCCCUGGACACCGAAAGCGAAGCCG | |
| | AGGUCCAGGCCGCCCUGGACAAGGCCCGAGAGGGCAGGACCACCAUCGUGAUCGCCCAUAG | |
| | GUUGAGCACCGUGAGGAAUGCCGACGUGAUCGCUGGAUUCGAGGACGGCGUUAUCGUGGAG | |
| | CAGGGCUCUCACUCGGAGCUGAUGAAAAAAGAGGGCGUGUACUUCAAACUCGUGAACAUGC | |
| | AGACUUCCGGAUCACAGAUCCAGUCCGAGGAGUUCGAGCUCAACGAUGAGAAGGCUGCCAC | |
| | UAGAAUGGCACCAAACGGCUGGAAGUCCCGUCUUUUCAGACACUCUACGCAGAAGAAUCUG | |
| | AAGAACAGCCAGAUGUGCCAGAAGUCUCUGGACGUGGAAACGGACGGCCUGGAAGCCAACG | |
| | UCCCUCCCGUGUCCUUCCUGAAAGUCCUGAAGCUAAACAAAACAGAGUGGCCUUACUUUGU | |
| | GGUGGGCACUGUUUGCGCCAUCGCCAACGGCGGCCUGCAGCCUGCGUUCAGCGUGAUCUUU | |
| | AGCGAGAUUAUAGCUAUUUUUGGCCCUGGAGACGAUGCUGUGAAGCAACAGAAGUGCAACA | |
| | UCUUUAGUCUUAUCUUCCUUUUCCUCGGAAUCAUCAGCUUUUUCACGUUCUUCCUUCAGGG | |
| | UUUUACCUUUGGCAAGGCCGGAGAGAUACUCACUAGACGCCUGAGAUCAAUGGCUUUUAAG | |
| | GCCAUGCUGAGACAGGACAUGAGCUGGUUCGACGACCACAAGAAUUCUACCGGAGCACUGU | |
| | CCACAAGACUGGCAACCGACGCCGCCCAGGUCCAGGGGGCCACUGGCACCCGGCUGGCCCU | |
| | GAUCGCUCAAAACAUUGCAAACCUGGGAACUGGCAUCAUCAUUAGCUUCAUCUAUGGAUGG | |
| | CAGCUGACACUUCUGCUGCUGGCCGUCGUGCCAAUUAUCGCCGUGAGCGGGAUCGUCGAGA | |
| | UGAAACUCCUCGCUGGGAAUGCUAAGAGGGACAAGAAGGAGCUGGAGGCCGCGGGCAAGAU | |
| | CGCCACUGAGGCUAUCGAGAAUAUCCGCACCGUUGUGAGCUUGACACAGGAGAGAAAGUUC | |
| | GAGAGCAUGUAUGUGGAGAAGCUGUACGGACCAUACAGAAAUUCAGUGCAGAAGGCCCACA | |
| | UCUACGGAAUUACCUUCUCCAUCAGCCAGGCAUUCAUGUACUUUUCUUACGCCGGCUGUUU | |
| | UAGAUUCGGCGCAUACCUGAUCGUGAACGGCCAUAUGAGGUUCAGAGACGUGAUCCUGGUU | |
| | UUCUCCGCCAUAGUGUUUGGCGCUGUCGCUCUGGGCCACGCCAGCUCAUUUGCUCCCGAUU | |
| | AUGCAAAGGCAAAGCUGUCCGCCGCACACCUCUUCAUGCUCUUCGAGCGUCAGCCUCUGAU | |
| | CGACUCCUACUCAGAGGAGGGGCUCAAGCCCGACAAGUUCGAAGGCAACAUCACUUUCAAC | |
| | GAAGUGGUGUUCAACUACCCUACCCGGGCAAACGUGCCUGUGCUGCAGGGCCUGAGCCUGG | |
| | AGGUGAAGAAAGGACAGACCCUGGCUCUGGUAGGCUCAUCCGGAUGCGGCAAAUCAACAGU | |
| | GGUGCAACUGCUCGAGCGGUUCUACGACCCCCUGGCGGGGACCGUUCUCCUGGAUGGCCAG | |
| | GAGGCAAAGAAGCUGAACGUGCAGUGGCUGAGAGCACAGCUGGGGAUUGUGUCCCAGGAAC | |
| | CGAUUCUGUUUGACUGCAGCAUCGCCGAGAACAUCGCCUACGGAGAUAACAGCAGGGUGGU | |
| | GAGCCAGGAUGAGAUCGUGAGCGCCGCAAAAGCCGCCAACAUCCACCCCUUCAUUGAGACC | |
| | CUGCCACACAAGUACGAGACCAGAGUGGGCGACAAGGGCACCCAGCUGUCAGGAGGACAGA | |
| | AGCAGCGUAUCGCCAUCGCCAGAGCCCUGAUUCGGCAGCCCCAGAUUCUGCUGCUGGACGA | |
| | GGCUACAAGCGCUCUGGACACCGAGUCCGAAAAGGUGGUGCAGGAGGCACUUGACAAGGCC | |
| | AGAGAGGGCAGAACCUGCAUAGUGAUUGCCCACAGACUGAGCACCAUUCAAAACGCCGACC | |
| | UGAUCGUGGUUUUCCAGAAUGGGCGGGUUAAGGAGCAUGGCACCCACCAGCAACUGCUGGC | |
| | CCAGAAGGGCAUCUAUUUCAGCAUGGUGAGCGUGCAGGCCGGCACACAGAAUCUGGACUAC | |
| | AAGGACGACGACGACAAG | |
| 3′ UTR | UGAUAAUAGGCUGGAGCCUCGGUGGCCAUGCUUCUUGCCCCUUGGGCCUCCCCCCAGCCCC | 172 |
| | UCCUCCCCUUCCUGCACCCGUACCCCCUCCAUAAAGUAGGAAACACUACAGUGGUCUUUGA | |
| | AUAAAGUCUGAGUGGGCGGC | |
| ELP- | MDLEAAKNGTAWRPTSAEGDFELGISSKQKRKKTKTVKMIGVLTLFRYSDWQDKLFMSLGT | 139 |
| hPFIC3- | IMAIAHGSGLPLMMIVFGEMTDKFVDTAGNFSFPVNFSLSLLNPGKILEEEMTRYAYYYSG | |
| 04-002.2 - | LGAGVLVAAYIQVSFWTLAAGRQIRK1RQKFFHAILRQEIGWFDINDTTELNTRLTDDISK | |
| amino acid | ISEGIGDKVGMFFQAVATFFAGFIVGFIRGWKLTLVIMAISPILGLSAAVWAKILSAFSDK | |
| | ELAAYAKAGAVAEEALGAIRTVIAFGGQNKELERYQKHLENAKEIGIKKAISANISMGIAF | |
| | LLIYASYALAFWYGSTLVISKEYTIGNAMTVFFSILIGAFSVGQAAPCIDAFANARGAAYV | |
| | IFDIIDNNPKIDSFSERGHKPDS1KGNLEFNDVHFSYPSRANVKILKGLNLKVQSGQTVAL | |
| | VGSSGCGKSTTVQLIQRLYDPDEGTINIDGQDIRNFNVNYLREIIGVVSQEPVLFSTTIAE | |
| | NICYGRGNVTMDEIKKAVKEANAYEFIMKLPQKFDTLVGERGAQLSGGQKQRIAIARALVR | |
| | NPKILLLDEATSALDTESEAEVQAALDKAREGRTTIVIAHRLSTVRNADVIAGFEDGVIVE | |
| | QGSHSELMKKEGVYFKLVNMQTSGSQIQSEEFELNDEKAATRMAPNGWKSRLFRHSTQKNL | |
| | KNSQMCQKSLDVETDGLEANVPPVSFLKVLKLNKTEWPYFVVGTVCAIANGGLQPAFSVIE | |
| | SEIIAIFGPGDDAVKQQKCNIFSLIFLFLGIISFFTFFLQGFTFGKAGEILTRRLRSMAFK | |
| | AMLRQDMSWFDDHKNSTGALSTRLATDAAQVQGATGTRLALIAQNIANLGTGIIISFIYGW | |
| | QLTLLLLAVVPIIAVSGIVEMKLLAGNAKRDKKELEAAGKIATEAIEN1RTVVSLTQERKF | |
| | ESMYVEKLYGPYRNSVQKAHIYGITFSISQAFMYFSYAGCFRFGAYLIVNGHMRFRDVILV | |
| | FSAIVFGAVALGHASSFAPDYAKAKLSAAHLFMLFERQPLIDSYSEEGLKPDKFEGNITFN | |
| | EVVFNYPTRANVPVLQGLSLEVKKGQTLALVGSSGCGKSTVVQLLERFYDPLAGTVLLDGQ | |
| | EAKKLNVQWLRAQLGIVSQEPILFDCSIAENIAYGDNSRVVSQDEIVSAAKAANIETPFIE | |
| | TLPHKYETRVGDKGTQLSGGQKQRIAIARALIRQPQILLLDEATSALDTESEKVVQEALDK | |
| | AREGRTCIVIAHRLSTIQNADLIVVFQNGRVKEHGTHQQLLAQKGIYFSMVSVQAGTQNLD | |
| | YKDDDDK | |

SEQ ID NO: 140 includes, from 5′ to 3′, 5′ UTR (SEQ ID NO: 12),
ORF (SEQ ID NO: 257), 3′ UTR (SEQ ID NO: 172

| | | |
|---|---|---|
| 5′ UTR | GGGAAAUAAGAGAGAAAAGAAGAGUAAGAAGAAAUAUAAGAGCCACC | 12 |
| ORF | AUGGACCUGGAGGCAGCCAAGAACGGCACCGCUUGGAGGCCGACAUCAGCCGAGGGAGACU | 257 |
| (excluding | UCGAACUGGGAAUCUCCAGUAAACAAAAGAGAAAGAAGACCAAGACAGUGAAAAUGAUCGG | |
| the stop | AGUGCUGACACUGUUCAGGUACUCCGACUGGCAGGACAAGCUCUUUAUGUCCCUCGGCACC | |
| codon) | AUCAUGGCCAUUGCUCACGGCAGCGGCCUGCCUUUAAUGAUGAUCGUUUUCGGGGAGAUGA | |
| | CCGACAAAUUCGUGGAUACAGCCGGAAACUUCUCGUUCCCCGUGAACUUUAGCCUGAGCCU | |
| | GCUGAAUCCUGGGAAAAUCCUGGAGGAGGAAAUGACCAGGUACGCCUACUACUACAGCGGC | |
| | CUGGGGGCUGGCGUGCUGGUGGCCGCCUACAUCCAGGUGUCCUUCUGGACUCUGGCCGCCG | |
| | GCAGACAGAUCAGGAAGAUCAGACAGAAGUUCUUCCACGCUAUUCUGAGGCAGGAAAUUGG | |
| | GUGGUUCGACAUCAACGACACUACCGAGCUUAACACGAGACUGACCGACGACAUUAGCAAG | |
| | AUCUCUGAAGGCAUCGGUGAUAAGGUGGGCAUGUUCUUCCAAGCCGUGGCCACCUUUUUCG | |
| | CAGGGUUCAUCGUGGGAUUUAUCCGGGGCUGGAAGCUUACCCUGGUCAUCAUGGCUAUCAG | |
| | CCCGAUUCUGGGCCUCAGCGCCGCAGUUUGGGCCAAGAUCCUGUCCGCUUUCUCCGACAAG | |
| | GAGCUCGCCGCCUACGCCAAGGCUGGUGCAGUGGCUGAGGAGGCCCUUGGAGCCAUUCGUA | |
| | CCGUGAUCGCCUUUGGCGGCCAGAACAAAGAGCUAGAGAGAUACCAAAAACACUUGGAGAA | |
| | CGCCAAGGAGAUCGGCAUUAAGAAGGCCAUCUCUGCCAACAUUUCCAUGGGGAUCGCCUUC | |
| | CUGCUGAUCUACGCCAGCUACGCCCUGGCUUUUUGGUACGGCAGUACGCUGGUGAUUAGCA | |
| | AGGAGUACACCAUCGGCAACGCCAUGACCGUGUUUUUCUCCAUUCUCAUCGGAGCAUUCUC | |
| | CGUGGGCCAGGCUGCCCCCUGCAUCGACGCGUUCGCCAAUGCCAGAGGCGCCGCCUAUGUG | |
| | AUUUUCGACAUCAUCGACAAUAACCCAAAGAUCGACAGUUUCUCUGAACGUGGACACAAAC | |
| | CAGACAGCAUCAAAGGAAAUCUGGAGUUCAACGACGUGCACUUCAGCUACCCAUCCAGGGC | |
| | CAACGUGAAGAUUCUGAAGGGCUUAAACCUGAAGGUGCAGAGUGGACAGACCGUGGCCCUG | |
| | GUGGGGUCUUCUGGCUGCGGCAAGAGCACCACCGUGCAGCUCAUUCAGAGACUUUAUGACC | |
| | CCGAUGAGGGCACUAUAAACAUCGAUGGCCAGGACAUCAGGAACUUCAAUGUGAACUACUU | |
| | AAGGGAAAUUAUCGGCGUGGUGAGCCAGGAGCCCGUGCUGUUCUCUACCACGAUUGCAGAG | |
| | AAUAUCUGCUACGGGAGAGGCAACGUGACCAUGGACGAAAUCAAAAAAGCUGUAAAAGAGG | |
| | CUAACGCUUACGAGUUCAUUAUGAAACUACCCCAGAAGUUCGAUACCCUCGUGGGGGAGAG | |
| | GGGUGCACAGCUGAGCGGUGGCCAGAAGCAGAGGAUCGCCAUAGCAAGAGCCCUGGUGAGA | |
| | AACCCCAAAAUCCUCCUUUUGGAUGAGGCCACCUCCGCCCUCGACACCGAGAGCGAAGCCG | |
| | AGGUGCAGGCCGCCCUCGACAAGGCCAGGGAGGGCCGCACCACCAUUGUGAUCGCCCACAG | |
| | GCUGAGCACCGUGAGAAACGCCGACGUGAUUGCCGGAUUCGAGGACGGCGUGAUCGUGGAG | |
| | CAGGGCAGCCACAGCGAGCUCAUGAAAAAGGAAGGCGUCUACUUCAAACUGGUGAAUAUGC | |
| | AGACCUCGGGUAGCCAAAUCCAGUCCGAGGAGUUUGAGUUAAACGACGAGAAGGCCGCCAC | |
| | CCGGAUGGCCCCCAAUGGGUGGAAGAGCCGCCUGUUUAGGCACUCAACCCAAAAGAACCUG | |
| | AAGAACUCCCAGAUGUGUCAGAAAUCACUGGACGUGGAAACCGACGGGCUGGAAGCUAACG | |
| | UGCCUCCCGUGAGUUUCCUGAAGGUGCUGAAGCUGAACAAGACGGAGUGGCCCUAUUUUGU | |
| | CGUUGGAACAGUGUGCGCAAUCGCCAACGGCGGCCUCCAGCCGGCAUUUAGCGUGAUUUUC | |
| | AGCGAGAUCAUCGCCAUAUUCGGCCCUGGGGAUGACGCUGUCAAGCAGCAGAAAUGCAACA | |
| | UCUUCAGCCUAAUAUUUCUCUUUCUGGGAAUUAUCAGCUUCUUCACCUUCUUCCUGCAGGG | |
| | GUUUACCUUCGGAAAAGCCGGCGAGAUCCUCACCCGCAGACUGAGAUCCAUGGCCUUCAAG | |
| | GCCAUGCUGAGGCAGGAUAUGUCCUGGUUCGAUGACCACAAGAACAGCACCGGCGCCCUGA | |
| | GCACCAGGCUGGCCACUGAUGCCGCUCAGGUCCAGGGUGCUACAGGCACCCGCCUUGCCCU | |
| | GAUUGCCCAGAACAUUGCUAACCUGGGGACCGGGAUCAUCAUCAGCUUUAUCUACGGGUGG | |
| | CAGCUGACCCUCUUACUGCUGGCCGUGGUGCCAAUCAUCGCCGUGAGCGGGAUCGUGGAGA | |
| | UGAAGCUGCUGGCCGGAAAUGCUAAGAGAGAUAAGAAGGAGCUGGAGGCCGCCGGAAAGAU | |
| | CGCCACAGAGGCCAUCGAAAACAUUAGAACUGUAGUGAGCCUGACCCAGGAGAGAAAGUUU | |
| | GAGAGCAUGUACGUGGAGAAGCUCUACGGACCCUACAGGAACUCCGUGCAGAAGGCACACA | |
| | UCUACGGCAUCACUUUCUCGAUUAGCCAGGCCUUCAUGUACUUUAGCUAUGCCGGUUGCUU | |
| | CAGGUUUGGUGCUUACCUGAUCGUCAAUGGCCACAUGAGGUUUAGAGACGUCAUCCUGGUG | |
| | UUUAGCGCCAUCGUCUUCGGAGCUGUGGCUCUGGGCCACGCCUCCAGCUUCGCCCCUGACU | |
| | ACGCCAAGGCCAAGCUGAGCGCCGCCCAUCUGUUCAUGCUGUUUGAACGUCAGCCACUGAU | |
| | CGACUCAUAUAGCGAGGAAGGGCUGAAACCCGAUAAAUUCGAGGGAAAUAUUACAUUCAAU | |
| | GAGGUUGUAUUCAACUACCCUACCAGAGCCAACGUGCCUGUGCUGCAGGGCCUGUCCCUGG | |
| | AGGUGAAAAAGGGACAGACCCUGGCUCUGGUGGGCUCUAGCGGCUGUGGCAAGAGCACCGU | |
| | GGUGCAGCUGCUGGAGAGAUUUUACGAUCCUCUGGCCGGCACAGUGCUGCUGGACGGCCAG | |
| | GAGGCUAAAAAACUGAAUGUGCAGUGGCUGCGGGCUCAACUGGGCAUCGUGUCCCAGGAGC | |
| | CCAUACUGUUCGAUUGUAGCAUCGCCGAAAAUAUUGCCUACGGAGACAAUAGCAGAGUGGU | |
| | UUCACAAGAUGAGAUUGUAAGUGCCGCCAAGGCCGCCAACAUCCACCCCUUCAUCGAAACA | |
| | CUCCCCCACAAGUACGAGACAAGGGUUGGAGAUAAGGGCACCCAGCUGUCCGGUGGCCAGA | |
| | AACAGAGAAUCGCCAUCGCCCGGGCUCUGAUCAGACAGCCUCAGAUCCUCCUGUUGGACGA | |
| | GGCUACUUCCGCCUUGGACACCGAAUCGGAGAAAGUGGUGCAGGAGGCCCUCGACAAGGCU | |
| | AGAGAGGGAAGAACCUGUAUUGUGAUCGCGCAUAGGCUCAGCACCAUCCAGAAUGCCGAUC | |
| | UGAUCGUCGUGUUCCAAAACGGACGCGUGAAGGAGCACGGCACCCACCAGCAAUUGCUCGC | |
| | ACAGAAAGGGAUCUACUUCAGCAUGGUGUCCGUGCAGGCAGGCACCCAGAAUCUG | |
| 3′ UTR | UGAUAAUAGGCUGGAGCCUCGGUGGCCAUGCUUCUUGCCCCUUGGGCCUCCCCCCAGCCCC | 172 |
| | UCCUCCCCUUCCUGCACCCGUACCCCCUCCAUAAAGUAGGAAACACUACAGUGGUCUUUGA | |
| | AUAAAGUCUGAGUGGGCGGC | |
| ELP- | MDLEAAKNGTAWRPTSAEGDFELGISSKQKRKKTKTVKMIGVLTLFRYSDWQDKLFMSLGT | 141 |
| hPFIC3- | IMAIAHGSGLPLMMIVFGEMTDKFVDTAGNFSFPVNFSLSLLNPGKILEEEMTRYAYYYSG | |
| 03-003 - | LGAGVLVAAYIQVSFWTLAAGRQIRK1RQKFFHAILRQEIGWFDINDTTELNTRLTDDISK | |
| amino acid | ISEGIGDKVGMFFQAVATFFAGFIVGFIRGWKLTLVIMAISPILGLSAAVWAKILSAFSDK | |
| | ELAAYAKAGAVAEEALGAIRTVIAFGGQNKELERYQKHLENAKEIGIKKAISANISMGIAF | |
| | LLIYASYALAFWYGSTLVISKEYTIGNAMTVFFSILIGAFSVGQAAPCIDAFANARGAAYV | |
| | IFDIIDNNPKIDSFSERGHKPDS1KGNLEFNDVHFSYPSRANVKILKGLNLKVQSGQTVAL | |
| | VGSSGCGKSTTVQLIQRLYDPDEGTINIDGQDIRNFNVNYLREIIGVVSQEPVLFSTTIAE | |
| | NICYGRGNVTMDEIKKAVKEANAYEFIMKLPQKFDTLVGERGAQLSGGQKQRIAIARALVR | |
| | NPKILLLDEATSALDTESEAEVQAALDKAREGRTTIVIAHRLSTVRNADVIAGFEDGVIVE | |
| | QGSHSELMKKEGVYFKLVNMQTSGSQIQSEEFELNDEKAATRMAPNGWKSRLFRHSTQKNL | |
| | KNSQMCQKSLDVETDGLEANVPPVSFLKVLKLNKTEWPYFVVGTVCAIANGGLQPAFSVIE | |
| | SEIIAIFGPGDDAVKQQKCNIFSLIFLFLGIISFFTFFLQGFTFGKAGEILTRRLRSMAFK | |
| | AMLRQDMSWFDDHKNSTGALSTRLATDAAQVQGATGTRLALIAQNIANLGTGIIISFIYGW | |
| | QLTLLLLAVVPIIAVSGIVEMKLLAGNAKRDKKELEAAGKIATEAIEN1RTVVSLTQERKF | |
| | ESMYVEKLYGPYRNSVQKAHIYGITFSISQAFMYFSYAGCFRFGAYLIVNGHMRFRDVILV | |
| | FSAIVFGAVALGHASSFAPDYAKAKLSAAHLFMLFERQPLIDSYSEEGLKPDKFEGNITFN | |
| | EVVFNYPTRANVPVLQGLSLEVKKGQTLALVGSSGCGKSTVVQLLERFYDPLAGTVLLDGQ | |
| | EAKKLNVQWLRAQLGIVSQEPILFDCSIAENIAYGDNSRVVSQDEIVSAAKAANIETPFIE | |
| | TLPHKYETRVGDKGTQLSGGQKQRIAIARALIRQPQILLLDEATSALDTESEKVVQEALDK | |
| | AREGRTCIVIAHRLSTIQNADLIVVFQNGRVKEHGTHQQLLAQKGIYFSMVSVQAGTQNL | |

SEQ ID NO: 142 includes, from 5′ to 3′, 5′ UTR (SEQ ID NO: 12),
ORF (SEQ ID NO: 293), 3′ UTR (SEQ ID NO: 172

| | | |
|---|---|---|
| 5′ UTR | GGGAAAUAAGAGAGAAAAGAAGAGUAAGAAGAAAUAUAAGAGCCACC | 12 |
| ORF | AUGGACCUAGAGGCCGCGAAGAACGGCACCGCCUGGAGACCUACCUCCGCCGAGGGGGACU | 293 |
| (excluding | UCGAGUUGGGUAUCAGCUCUAAACAGAAGAGGAAGAAAACCAAGACUGUGAAAAUGAUAGG | |
| the stop | CGUGCUGACCCUCUUCAGAUACUCCGACUGGCAGGACAAGCUGUUCAUGUCCCUCGGCACC | |
| codon) | AUCAUGGCUAUCGCCCAUGGAUCUGGACUGCCCCUUAUGAUGAUCGUUUUCGGGGAGAUGA | |
| | CCGACAAGUUCGUGGACACCGCAGGAAACUUCUCCUUCCCCGUGAACUUCAGCUUGAGCCU | |
| | GUUGAACCCAGGCAAGAUACUCGAGGAGGAGAUGACCCGCUACGCCUACUACUACAGCGGC | |
| | CUCGGCGCCGGGGUGCUGGUGGCAGCUUAUAUCCAGGUGAGCUUCUGGACGCUGGCUGCCG | |
| | GCCGACAGAUUCGCAAGAUCCGCCAGAAAUUCUUCCACGCCAUCCUUAGGCAGGAGAUCGG | |
| | CUGGUUCGAUAUCAACGACACCACAGAGCUGAAUACUCGGCUAACCGACGACAUUAGCAAG | |
| | AUCAGCGAGGGAAUCGGCGACAAGGUGGGCAUGUUUUUCCAAGCUGUGGCUACCUUCUUCG | |
| | CCGGCUUCAUCGUAGGAUUCAUUAGAGGAUGGAAGCUGACCCUGGUGAUCAUGGCUAUCAG | |
| | CCCAAUCUUGGGCCUGUCCGCUGCCGUGUGGGCCAAAAUUCUGUCUGCGUUUUCAGAUAAG | |
| | GAGCUGGCCGCCUACGCCAAGGCAGGCGCUGUCGCCGAGGAGGCUCUGGGCGCCAUCAGAA | |
| | CUGUGAUCGCCUUCGGUGGACAGAACAAGGAGUUGGAAAGAUAUCAGAAGCACUUGGAGAA | |
| | CGCCAAGGAGAUCGGCAUCAAGAAGGCCAUCUCUGCCAAUAUCAGCAUGGGCAUCGCGUUU | |
| | CUGCUGAUUUACGCCAGCUACGCACUGGCCUUCUGGUAUGGCUCUACCUUGGUCAUCAGCA | |
| | AGGAGUACACCAUCGGCAACGCUAUGACUGUGUUCUUCUCCAUUCUGAUCGGCGCAUUCAG | |
| | CGUGGGACAGGCCGCCCCUUGCAUCGACGCUUUCGCCAACGCCAGGGGCGCCGCCUACGUC | |
| | AUCUUUGACAUUAUCGACAACAACCCCAAAAUCGACUCUUUCAGCGAAAGAGGCCACAAAC | |
| | CCGACUCCAUCAAGGGUAACCUGGAGUUCAACGAUGUCCAUUUCUCCUACCCUUCUAGGGC | |
| | CAACGUGAAGAUCCUGAAGGGCCUAAAUCUGAAGGUGCAGUCAGGACAGACCGUCGCUCUG | |
| | GUGGGUAGCUCCGGCUGCGGCAAGUCCACCACAGUGCAGCUUAUCCAGAGGUUGUAUGACC | |
| | CUGAUGAAGGCACCAUUAAUAUCGACGGCCAGGACAUCAGGAAUUUUAAUGUGAAUUACCU | |
| | GAGAGAGAUUAUCGGCGUGGUCAGCCAGGAGCCCGUCCUAUUCAGCACAACAAUAGCCGAA | |
| | AACAUCUGUUAUGGCAGGGGGAACGUCACAAUGGAUGAGAUCAAGAAGGCCGUGAAAGAGG | |
| | CUAACGCAUACGAAUUUAUCAUGAAGCUCCCUCAGAAGUUCGACACUUUGGUGGGCGAGAG | |
| | AGGCGCCCAACUGAGCGGCGGCCAGAAGCAGAGAAUCGCAAUCGCUAGAGCCCUCGUCCGG | |
| | AAUCCAAAGAUCCUGCUGCUCGACGAGGCCACAAGCGCUCUUGACACCGAGUCAGAGGCCG | |
| | AGGUGCAAGCUGCCCUGGACAAAGCCCGGGAGGGCAGAACCACCAUCGUGAUUGCCCACAG | |
| | GCUGUCCACCGUUAGAAAUGCGGACGUCAUCGCCGGGUUCGAGGACGGGGUGAUUGUGGAG | |
| | CAGGGCAGCCAUAGCGAGCUCAUGAAGAAGGAGGGAGUGUACUUCAAGCUGGUCAAUAUGC | |
| | AGACCAGUGGCUCUCAGAUCCAGAGCGAGGAGUUCGAGCUGAACGACGAGAAGGCCGCCAC | |
| | UAGAAUGGCCCCCAAUGGCUGGAAAAGCAGACUCUUCAGACACAGCACGCAGAAGAACCUG | |
| | AAGAACAGUCAGAUGUGCCAGAAGAGUCUGGACGUCGAGACCGACGGCCUGGAGGCCAACG | |
| | UGCCCCCCGUCAGUUUCCUGAAGGUGCUGAAACUAAACAAAACUGAGUGGCCUUACUUCGU | |
| | UGUAGGAACCGUCUGCGCUAUCGCCAACGGGGGACUGCAGCCCGCCUUUAGCGUGAUCUUU | |
| | AGCGAAAUCAUCGCCAUCUUUGGCCCCGGCGACGACGCUGUGAAGCAGCAGAAGUGCAAUA | |
| | UCUUCUCUUUGAUCUUUCUGUUCCUGGGCAUCAUCUCAUUCUUUACAUUUUUUCUCCAGGG | |
| | CUUCACCUUCGGCAAGGCCGGAGAGAUUCUGACCAGAAGACUGAGAAGCAUGGCCUUCAAG | |
| | GCUAUGCUGAGGCAGGACAUGAGCUGGUUUGACGAUCACAAGAACAGCACUGGCGCCCUGA | |
| | GCACAAGACUGGCUACCGACGCCGCACAGGUGCAGGGCGCCACCGGGACUAGGUUGGCUCU | |
| | GAUCGCCCAGAAUAUCGCCAAUCUGGGCACUGGCAUUAUUAUUAGCUUCAUCUAUGGCUGG | |
| | CAGCUGACCCUGCUGCUGCUGGCCGUUGUGCCCAUCAUCGCUGUGUCAGGCAUCGUGGAAA | |
| | UGAAGCUCCUCGCUGGCAACGCCAAAAGGGACAAGAAGGAGCUGGAGGCCGCAGGCAAGAU | |
| | UGCCACCGAGGCCAUCGAGAAUAUCCGCACCGUCGUGAGCUUGACCCAGGAAAGAAAGUUC | |
| | GAGAGCAUGUACGUAGAGAAACUGUACGGACCCUACCGCAAUUCCGUACAGAAGGCUCAUA | |
| | UCUACGGGAUCACUUUUUCCAUCUCCCAGGCCUUCAUGUACUUUAGCUACGCCGGCUGCUU | |
| | UAGAUUCGGUGCCUACUUGAUCGUGAACGGACACAUGCGAUUCAGAGAUGUGAUUCUGGUG | |
| | UUUAGCGCUAUUGUGUUCGGCGCCGUCGCCCUCGGGCACGCCAGCAGCUUCGCCCCCGACU | |
| | ACGCGAAGGCUAAGCUCUCAGCUGCGCACCUGUUCAUGCUGUUCGAGCGCCAGCCCCUCAU | |
| | CGACUCCUACAGCGAAGAGGGAUUAAAGCCGGAUAAAUUCGAGGGCAACAUCACCUUUAAC | |
| | GAGGUGGUAUUUAACUAUCCAACCCGCGCCAACGUGCCGGUUCUGCAAGGACUCAGCCUUG | |
| | AGGUCAAGAAGGGCCAGACCCUUGCGCUCGUCGGCUCCAGCGGCUGCGGCAAAAGCACCGU | |
| | CGUGCAGCUGCUGGAGAGAUUCUAUGACCCCCUGGCCGGGACUGUGCUGCUGGACGGCCAG | |
| | GAGGCUAAGAAGCUGAACGUGCAGUGGCUCCGGGCUCAGCUGGGAAUCGUGAGCCAGGAAC | |
| | CGAUACUGUUUGACUGCAGCAUCGCUGAGAACAUCGCCUAUGGAGAUAACAGCAGGGUGGU | |
| | GUCCCAGGAUGAAAUUGUGAGCGCUGCCAAAGCCGCCAACAUCCACCCUUUCAUCGAGACU | |
| | CUGCCCCAUAAGUACGAGACCAGAGUGGGCGACAAAGGUACACAGCUGUCCGGAGGGCAGA | |
| | AGCAGAGAAUUGCCAUCGCCAGGGCCUUGAUUAGACAGCCGCAGAUCCUUCUGCUGGACGA | |
| | GGCCACUUCUGCCCUGGACACCGAAUCCGAGAAGGUUGUGCAGGAAGCCCUGGACAAGGCA | |
| | AGAGAGGGCCGUACCUGCAUCGUGAUCGCCCACAGACUGAGCACGAUCCAGAACGCAGAUC | |
| | UGAUCGUCGUGUUCCAGAACGGAAGAGUUAAAGAGCAUGGGACACACCAGCAGCUCCUGGC | |
| | UCAGAAGGGCAUCUAUUUCUCCAUGGUGAGCGUGCAGGCCGGCACCCAGAACCUG | |
| 3′ UTR | UGAUAAUAGGCUGGAGCCUCGGUGGCCAUGCUUCUUGCCCCUUGGGCCUCCCCCCAGCCCC | 172 |
| | UCCUCCCCUUCCUGCACCCGUACCCCCUCCAUAAAGUAGGAAACACUACAGUGGUCUUUGA | |
| | AUAAAGUCUGAGUGGGCGGC | |
| ELP- | MDLEAAKNGTAWRPTSAEGDFELGISSKQKRKKTKTVKMIGVLTLFRYSDWQDKLFMSLGT | 143 |
| hPFIC3- | IMAIAHGSGLPLMMIVFGEMTDKFVDTAGNFSFPVNFSLSLLNPGKILEEEMTRYAYYYSG | |
| 03-005.2 - | LGAGVLVAAYIQVSFWTLAAGRQIRK1RQKFFHAILRQEIGWFDINDTTELNTRLTDDISK | |
| amino acid | ISEGIGDKVGMFFQAVATFFAGFIVGFIRGWKLTLVIMAISPILGLSAAVWAKILSAFSDK | |
| | ELAAYAKAGAVAEEALGAIRTVIAFGGQNKELERYQKHLENAKEIGIKKAISANISMGIAF | |
| | LLIYASYALAFWYGSTLVISKEYTIGNAMTVFFSILIGAFSVGQAAPCIDAFANARGAAYV | |
| | IFDIIDNNPKIDSFSERGHKPDS1KGNLEFNDVHFSYPSRANVKILKGLNLKVQSGQTVAL | |
| | VGSSGCGKSTTVQLIQRLYDPDEGTINIDGQDIRNFNVNYLREIIGVVSQEPVLFSTTIAE | |
| | NICYGRGNVTMDEIKKAVKEANAYEFIMKLPQKFDTLVGERGAQLSGGQKQRIAIARALVR | |
| | NPKILLLDEATSALDTESEAEVQAALDKAREGRTTIVIAHRLSTVRNADVIAGFEDGVIVE | |
| | QGSHSELMKKEGVYFKLVNMQTSGSQIQSEEFELNDEKAATRMAPNGWKSRLFRHSTQKNL | |
| | KNSQMCQKSLDVETDGLEANVPPVSFLKVLKLNKTEWPYFVVGTVCAIANGGLQPAFSVIE | |
| | SEIIAIFGPGDDAVKQQKCNIFSLIFLFLGIISFFTFFLQGFTFGKAGEILTRRLRSMAFK | |
| | AMLRQDMSWFDDHKNSTGALSTRLATDAAQVQGATGTRLALIAQNIANLGTGIIISFIYGW | |
| | QLTLLLLAVVPIIAVSGIVEMKLLAGNAKRDKKELEAAGKIATEAIEN1RTVVSLTQERKF | |
| | ESMYVEKLYGPYRNSVQKAHIYGITFSISQAFMYFSYAGCFRFGAYLIVNGHMRFRDVILV | |
| | FSAIVFGAVALGHASSFAPDYAKAKLSAAHLFMLFERQPLIDSYSEEGLKPDKFEGNITFN | |
| | EVVFNYPTRANVPVLQGLSLEVKKGQTLALVGSSGCGKSTVVQLLERFYDPLAGTVLLDGQ | |
| | EAKKLNVQWLRAQLGIVSQEPILFDCSIAENIAYGDNSRVVSQDEIVSAAKAANIETPFIE | |
| | TLPHKYETRVGDKGTQLSGGQKQRIAIARALIRQPQILLLDEATSALDTESEKVVQEALDK | |
| | AREGRTCIVIAHRLSTIQNADLIVVFQNGRVKEHGTHQQLLAQKGIYFSMVSVQAGTQNL | |

### EXAMPLES

### Example 1

### Manufacture of Polynucleotides

[0980] According to the present disclosure, the manufacture of polynucleotides and/or parts or regions thereof may be accomplished utilizing the methods taught in International Publication WO2014/152027, entitled “Manufacturing Methods for Production of RNA Transcripts,” the contents of which is incorporated herein by reference in its entirety.

[0981] Purification methods may include those taught in International Publication WO2014/152030 and International Publication WO2014/152031, each of which is incorporated herein by reference in its entirety.

[0982] Detection and characterization methods of the polynucleotides may be performed as taught in International Publication WO2014/144039, which is incorporated herein by reference in its entirety.

[0983] Characterization of the polynucleotides of the disclosure may be accomplished using polynucleotide mapping, reverse transcriptase sequencing, charge distribution analysis, detection of RNA impurities, or any combination of two or more of the foregoing. “Characterizing” comprises determining the RNA transcript sequence, determining the purity of the RNA transcript, or determining the charge heterogeneity of the RNA transcript, for example. Such methods are taught in, for example, International Publication WO2014/144711 and International Publication WO2014/144767, the content of each of which is incorporated herein by reference in its entirety.

### Example 2

### Chimeric Polynucleotide Synthesis

[0984] According to the present disclosure, two regions or parts of a chimeric polynucleotide may be joined or ligated using triphosphate chemistry. A first region or part of 100 nucleotides or less is chemically synthesized with a 5′ monophosphate and terminal 3′ des0H or blocked OH, for example. If the region is longer than 80 nucleotides, it may be synthesized as two strands for ligation.

[0985] If the first region or part is synthesized as a non-positionally modified region or part using in vitro transcription (IVT), conversion the 5′monophosphate with subsequent capping of the 3′ terminus may follow.

[0986] Monophosphate protecting groups may be selected from any of those known in the art.

[0987] The second region or part of the chimeric polynucleotide may be synthesized using either chemical synthesis or IVT methods. IVT methods may include an RNA polymerase that can utilize a primer with a modified cap. Alternatively, a cap of up to 130 nucleotides may be chemically synthesized and coupled to the IVT region or part. In some embodiments, a 5′ terminal cap is 7mG(5′)ppp(5′)NlmpNp.

[0988] For ligation methods, ligation with DNA T4 ligase, followed by treatment with DNase should readily avoid concatenation.

[0989] The entire chimeric polynucleotide need not be manufactured with a phosphate-sugar backbone. If one of the regions or parts encodes a polypeptide, then such region or part may comprise a phosphate-sugar backbone.

[0990] Ligation is then performed using any known click chemistry, orthoclick chemistry, solulink, or other bioconjugate chemistries known to those in the art.

[0991] Synthetic Route

[0992] The chimeric polynucleotide may be made using a series of starting segments. Such segments include:

[0993] (a) a capped and protected 5′ segment comprising a normal 3′OH (SEG. 1)

[0994] (b) a 5′ triphosphate segment, which may include the coding region of a polypeptide and a normal 3′OH (SEG. 2)

[0995] (c) a 5′ monophosphate segment for the 3′ end of the chimeric polynucleotide (e.g., the tail) comprising cordycepin or no 3′OH (SEG. 3)

[0996] After synthesis (chemical or IVT), segment 3 (SEG. 3) may be treated with cordycepin and then with pyrophosphatase to create the 5′ monophosphate.

[0997] Segment 2 (SEG. 2) may then be ligated to SEG. 3 using RNA ligase. The ligated polynucleotide is then purified and treated with pyrophosphatase to cleave the diphosphate. The treated SEG.2-SEG. 3 construct may then be purified and SEG. 1 is ligated to the 5′ terminus. A further purification step of the chimeric polynucleotide may be performed.

[0998] Where the chimeric polynucleotide encodes a polypeptide, the ligated or joined segments may be represented as: 5′UTR (SEG. 1), open reading frame or ORF (SEG. 2) and 3′UTR+Poly-A (SEG. 3).

[0999] The yields of each step may be as much as 90-95%.

### Example 3

### PCR for cDNA Production

[1000] PCR procedures for the preparation of cDNA may be performed using 2× KAPA HIFI™ HotStart ReadyMix by Kapa Biosystems (Woburn, Mass.). This system includes 2× KAPA ReadyMix 12.5 μl; Forward Primer (10 μM) 0.75 μl; Reverse Primer (10 μM) 0.75 μl; Template cDNA 100 ng; and dH₂O diluted to 25.0 μl. The reaction conditions may be at 95° C. for 5 min. The reaction may be performed for 25 cycles of 98° C. for 20 sec, then 58° C. for 15 sec, then 72° C. for 45 sec, then 72° C. for 5 min, then 4° C. to termination.

[1001] The reaction may be cleaned up using Invitrogen's PURELINK™ PCR Micro Kit (Carlsbad, Calif.) per manufacturer's instructions (up to 5 μg). Larger reactions may require a cleanup using a product with a larger capacity. Following the cleanup, the cDNA may be quantified using the NANODROP™ and analyzed by agarose gel electrophoresis to confirm that the cDNA is the expected size. The cDNA may then be submitted for sequencing analysis before proceeding to the in vitro transcription reaction.

### Example 4

### In Vitro Transcription (IVT)

[1002] The in vitro transcription reaction generates RNA polynucleotides. Such polynucleotides may comprise a region or part of the polynucleotides of the disclosure, including chemically modified RNA (e.g., mRNA) polynucleotides. The chemically modified RNA polynucleotides can be uniformly modified polynucleotides. The in vitro transcription reaction utilizes a custom mix of nucleotide triphosphates (NTPs). The NTPs may comprise chemically modified NTPs, or a mix of natural and chemically modified NTPs, or natural NTPs.

[1003] A typical in vitro transcription reaction includes the following:

| 1) | Template cDNA | 1.0 | μg |
|---|---|---|---|
| 2) | 10x transcription buffer | 2.0 | μl |
| | (400 mM Tris-HCl pH 8.0, 190 mM | | |
| | MgCl₂, 50 mM DTT, 10 mM Spermidine) | | |
| 3) | Custom NTPs (25 mM each) | 0.2 | μl |
| 4) | RNase Inhibitor | 20 | U |
| 5) | T7 RNA polymerase | 3000 | U |
| 6) | dH₂0 | up to 20.0 μl. and | |
| 7) | Incubation at 37° C. for 3 hr-5 hrs. | | |

[1004] The crude IVT mix may be stored at 4° C. overnight for cleanup the next day. 1 U of RNase-free DNase may then be used to digest the original template. After 15 minutes of incubation at 37° C., the mRNA may be purified using Ambion's MEGACLEAR™ Kit (Austin, Tex.) following the manufacturer's instructions. This kit can purify up to 500 μg of RNA. Following the cleanup, the RNA polynucleotide may be quantified using the NanoDrop and analyzed by agarose gel electrophoresis to confirm the RNA polynucleotide is the proper size and that no degradation of the RNA has occurred.

### Example 5

### Enzymatic Capping

[1005] Capping of a RNA polynucleotide is performed as follows where the mixture includes: IVT RNA 60 μg-180 μg and dH₂O up to 72 μl. The mixture is incubated at 65° C. for 5 minutes to denature RNA, and then is transferred immediately to ice.

[1006] The protocol then involves the mixing of 10× Capping Buffer (0.5 M Tris-HCl (pH 8.0), 60 mM KCl, 12.5 mM MgCl₂) (10.0 μl); 20 mM GTP (5.0 μl); 20 mM S-Adenosyl Methionine (2.5 μl); RNase Inhibitor (100 U); 2′-O-Methyltransferase (400U); Vaccinia capping enzyme (Guanylyl transferase) (40 U); dH₂O (Up to 28 μl); and incubation at 37° C. for 30 minutes for 60 μg RNA or up to 2 hours for 180 μg of RNA.

[1007] The RNA polynucleotide may then be purified using Ambion's MEGACLEAR™ Kit (Austin, Tex.) following the manufacturer's instructions. Following the cleanup, the RNA may be quantified using the NANODROP™ (ThermoFisher, Waltham, Mass.) and analyzed by agarose gel electrophoresis to confirm the RNA polynucleotide is the proper size and that no degradation of the RNA has occurred. The RNA polynucleotide product may also be sequenced by running a reverse-transcription-PCR to generate the cDNA for sequencing.

### Example 6

### Poly-A Tailing Reaction

[1008] Without a poly-T in the cDNA, a poly-A tailing reaction must be performed before cleaning the final product. This is done by mixing capped IVT RNA (100 μl); RNase Inhibitor (20 U); 10× Tailing Buffer (0.5 M Tris-HCl (pH 8.0), 2.5 M NaCl, 100 mM MgCl₂) (12.0 μl); 20 mM ATP (6.0 μl); Poly-A Polymerase (20 U); dH₂O up to 123.5 μl and incubation at 37° C. for 30 min. If the poly-A tail is already in the transcript, then the tailing reaction may be skipped and proceed directly to cleanup with Ambion's MEGACLEAR™ kit (Austin, Tex,) (up to 500 μg). Poly-A Polymerase may be a recombinant enzyme expressed in yeast.

[1009] It should be understood that the processivity or integrity of the poly-A tailing reaction may not always result in an exact size poly-A tail. Hence, poly-A tails of approximately between 40-200 nucleotides, e.g., about 40, 50, 60, 70, 80, 90, 91, 92, 93, 94, 95, 96, 97, 98, 99, 100, 101, 102, 103, 104, 105, 106, 107, 108, 109, 110, 150-165, 155, 156, 157, 158, 159, 160, 161, 162, 163, 164 or 165 are within the scope of the present disclosure.

### Example 7

### Natural 5′ Caps and 5′ Cap Analogues

[1010] 5′-capping of polynucleotides may be completed concomitantly during the in vitro-transcription reaction using the following chemical RNA cap analogs to generate the 5′-guanosine cap structure according to manufacturer protocols: 3″-O-Me-m7G(5)ppp(5′) G [the ARCA cap]; G(5′)ppp(5′)A; G(5′)ppp(5′)G; m7G(5′)ppp(5′)A; m7G(5′)ppp(5′)G (New England BioLabs, Ipswich, Mass.). 5′-capping of modified RNA may be completed post-transcriptionally using a Vaccinia Virus Capping Enzyme to generate the “Cap 0” structure: m7G(5′)ppp(5′)G (New England BioLabs, Ipswich, Mass.). Cap 1 structure may be generated using both Vaccinia Virus Capping Enzyme and a 2′-O methyl-transferase to generate: m7G(5′)ppp(5′)G-2′-O-methyl. Cap 2 structure may be generated from the Cap 1 structure followed by the 2′-O-methylation of the 5′-antepenultimate nucleotide using a 2′-O methyl-transferase. Cap 3 structure may be generated from the Cap 2 structure followed by the 2′-O-methylation of the 5′-preantepenultimate nucleotide using a 2′-O methyl-transferase. Enzymes are preferably derived from a recombinant source.

[1011] In some embodiments, a 5′ terminal cap is 7mG(5′)ppp(5′)NlmpNp.

[1012] When transfected into mammalian cells, the modified mRNAs have a stability of between 12-18 hours or more than 18 hours, e.g., 24, 36, 48, 60, 72 or greater than 72 hours.

### Example 8

### Capping Assays

### Protein Expression Assay

[1013] Polynucleotides (e.g., mRNA) encoding a polypeptide, containing any of the caps taught herein, can be transfected into cells at equal concentrations. The amount of protein secreted into the culture medium can be assayed by ELISA at 6, 12, 24 and/or 36 hours post-transfection. Synthetic polynucleotides that secrete higher levels of protein into the medium correspond to a synthetic polynucleotide with a higher translationally-competent cap structure.

### Purity Analysis Synthesis

[1014] RNA (e.g., mRNA) polynucleotides encoding a polypeptide, containing any of the caps taught herein can be compared for purity using denaturing Agarose-Urea gel electrophoresis or HPLC analysis. RNA polynucleotides with a single, consolidated band by electrophoresis correspond to the higher purity product compared to polynucleotides with multiple bands or streaking bands. Chemically modified RNA polynucleotides with a single HPLC peak also correspond to a higher purity product. The capping reaction with a higher efficiency provides for a more pure polynucleotide population.

### Cytokine Analysis

[1015] RNA (e.g., mRNA) polynucleotides encoding a polypeptide, containing any of the caps taught herein can be transfected into cells at multiple concentrations. The amount of pro-inflammatory cytokines, such as TNF-alpha and IFN-beta, secreted into the culture medium can be assayed by ELISA at 6, 12, 24 and/or 36 hours post-transfection. RNA polynucleotides resulting in the secretion of higher levels of pro-inflammatory cytokines into the medium correspond to polynucleotides containing an immune-activating cap structure.

### Capping Reaction Efficiency

[1016] RNA (e.g., mRNA) polynucleotides encoding a polypeptide, containing any of the caps taught herein can be analyzed for capping reaction efficiency by LC-MS after nuclease treatment. Nuclease treatment of capped polynucleotides yield a mixture of free nucleotides and the capped 5′-5-triphosphate cap structure detectable by LC-MS. The amount of capped product on the LC-MS spectra can be expressed as a percent of total polynucleotide from the reaction and correspond to capping reaction efficiency. The cap structure with a higher capping reaction efficiency has a higher amount of capped product by LC-MS.

### Example 9

### Agarose Gel Electrophoresis of Modified RNA or RT PCR Products

[1017] Individual RNA polynucleotides (200-400 ng in a 20 μl volume) or reverse transcribed PCR products (200-400 ng) may be loaded into a well on a non-denaturing 1.2% Agarose E-Gel (Invitrogen, Carlsbad, Calif.) and run for 12-15 minutes, according to the manufacturer protocol.

### Example 10

### Nanodrop Modified RNA Quantification and UV Spectral Data

[1018] Chemically modified RNA polynucleotides in TE buffer (1 μl) are used for Nanodrop UV absorbance readings to quantitate the yield of each polynucleotide from a chemical synthesis or in vitro transcription reaction.

### Example 11

### Formulation of Modified mRNA Using Lipidoids

[1019] RNA (e.g., mRNA) polynucleotides may be formulated for in vitro experiments by mixing the polynucleotides with the lipidoid at a set ratio prior to addition to cells. In vivo formulation may require the addition of extra ingredients to facilitate circulation throughout the body. To test the ability of these lipidoids to form particles suitable for in vivo work, a standard formulation process used for siRNA-lipidoid formulations may be used as a starting point. After formation of the particle, polynucleotide is added and allowed to integrate with the complex. The encapsulation efficiency is determined using a standard dye exclusion assays.

### Example 12

### Expression of ABCB4 Proteins in HEK293 Cells

[1020] HEK293 cells were transfected with ABCB4 modified RNA (modRNA) constructs. Four constructs were prepared: modRNA1 (hABCB4; isoform 1), modRNA2 (hABCB4; isoform 1 with a C-terminal flag), modRNA3 (hABCB4; isoform 2 with a C-terminal flag), and modRNA4 (mABCB4; with a C-terminal flag). Western blots were performed to confirm expression of ABCB4 protein in HEK293 cells, and the results are shown in FIG. 1. The left gel used anti-ABCB4 (C-219), which recognizes both hABCB4 and mABCB4. Both modRNA3 (human isoform 2) and modRNA4 (mouse) ABCB4 constructs were visible. In contrast, the right gel used an anti-ABCB4 antibody (P31I-26) that is hABCB4-specific. As expected, only modRNA3 (human isoform 2) was positive. A pC-DNA3.1-hABCB4 construct and GFP were used as positive and negative controls, respectively.

[1021] HEK293 cells were also transfected with codon-optimized ABCB4 modRNA constructs, as shown in FIG. 3. The codon-optimized ABCB4 modRNA constructs (lanes 5-18) showed a significant improvement in protein expression compared to the earlier modRNA (lane 2; no codon-optimization) when it was transfected in HEK293 cells.

### Example 13

### Evaluation of ABCB4 modRNAs in an mdr2-Knockout Mouse Model

[1022] It was previously shown that homogenous disruption of the murine mdr2 P-glycoprotein gene leads to the complete absence of phospholipid from bile and ultimately, to liver disease (Cell, 1993, 75: 451-462). In studies of the components of bile, only sphingomyelin was found to be increased in the mdr2 knockout mice compared with wild-type mice.

[1023] The mdr2 knockout mice were used to examine the effects of ABCB4 modRNAs in vivo. At time 0, the mice were given an intravenous injection of vehicle (negative control), eGFP (positive control), modRNA3 (hABCB4; 1.0 or 2.0 mg/kg), or modRNA4 (mABCB4; 1.0 or 2.0 mg/kg). Twenty-four or 48 hours later, bile was collected and analyzed for bilephospholipid content (i.e, the phosphotidylcholine). Liver pieces were also collected, and used to examine protein expression and/or histology.

[1024] As shown in FIG. 2, the mdr2 knockout mice treated with the modRNA constructs had significantly elevated levels of bile phosphatidylcholine (2- to 4-fold increase when compared with mdr2 knockout mice treated with PBS or eGFP controls); however, the levels were still markedly lower than the normal physiological level (only equivalent to 0.5% of WT level).

[1025] In order to confirm the improved function of codon-optimized modRNAs in the cell-based model, we transfected HEK293 cells with the set of codon-optimized modRNAs as shown in FIG. 3 and measured the ABCB4-mediated phospholipid output in cell culture medium. As functional ABCB4 permits phospholipids to exit the cell, the secretion of phospholipids (phosphatidylcholine) in cell culture was measured using lipid extraction from the cell culture media. The codon-optimized ABCB4 modRNA constructs were found to confer a marked increase in phosphatidylcholine-transporting activity in HEK293 cells (FIG. 4; bars 4-12 and modRNA5, modRNA6, modRNA7, modRNA8, and modRNA9). Based on these results, five modRNAs were selected for further analysis (indicated by arrows in FIG. 4). The five selected codon-optimized modRNA constructs were analyzed using the mdr2 knockout mouse model.

[1026] At time 0, the mice were given an intravenous injection of vehicle (PBS), eGFP (the control modRNA), modRNA5, modRNA6, modRNA7, modRNA8, and modRNA9 at the dosage level of 0.5 mg/kg. Twelve hours later, bile was collected and analyzed for phospholipid content. Ten volumes of methanol were added to the bile samples, and the resulting mixture was centrifuged at 5000 rpm for 10 min to remove any traceable protein. Ten μL of the solution was loaded to LC/MS/MS for analysis of phosphatidylcholine species (34:2) (PC).

[1027] As shown in FIG. 5, the codon-optimized ABCB4 constructs produced a dramatic increase (approximately 20-fold) in biliary phosphatidylcholine output compared to the controls (PBS or eGFP), and the resulting biliary PC output amounted to 5-10% of that of the wild-type mice, in comparison with the only 0.5% of WT level as observed in mice treated with the ABCB4 modRNA constructs without codon-optimization.

[1028] The hepatic expression of hABCB4 in Abcb4/mdr2 knockout mice was examined. Abcb4/mdr2 knockout mice were administered modRNA hABCB4 (modRNA7) or eGFP. Wild-type mice were used as a control. As shown in the Western blot of FIG. 6, administration of hABCB4 modRNA resulted in the hepatic expression of hABCB4 protein in the Abcb4 knockout mice, while the two controls, eGFP and wild-type, did not show any expression.

[1029] The location of the resulting ABCB4 protein in hepatocytes was examined using immunofluorescence. As shown in FIG. 7, ABCB4 modRNA resulted in the expression of ABCB4 protein at the canalicular domain of hepatocytes in vivo.

[1030] The codon-optimized hABCB4 modRNA constructs were also found to improve the serum total bile acid levels in the mdr2 knockout mice (FIG. 8).

[1031] Different formulations of the modRNAs were tested. FIG. 9 shows a kinetic analysis of bile phosphatidylcholine output in mdr2 knockout mice after a single injection of hABCB4 modRNA formulated in a compound 3 lipid nanoparticle. A one-phase decay analysis suggested that the functional half-life of hABCB4 is approximately 20 hours. A kinetic analysis of serum total bile acid levels in the same mice show a significant drop 12 hours after the injection (FIG. 10). When the construct (modRNA5) was formulated in two different lipid nanoparticles (compound 1 and compound 3), the modRNA shows a slight, but meaningful improvement in phosphatidylcholine output in bile in the compound 1 formulation (FIG. 11).

[1032] Three modRNAs were synthesized: modRNA5, modRNA7, and modRNA9 and formulated in compound 1. For the study, mice (n=3-4 per group) were dosed with an intravenous injection of the newly formulated modRNA5, modRNA7, or modRNA9, or the old formulation of modRNA7 (compound 3). Twelve hours after the injection, bile was collected from the subjects and the phospholipid content was measured using LC/MS.

[1033] As shown in FIG. 12, the ABCB4 modRNA formulated in compund 1 yielded 20-30% restoration of physiological levels of bile phosphatidylcholine (34:2). ABCB4 modRNA treatment also led to the recovery of the full range of phospholipid molecular species (data not shown).

[1034] The efficacy of the new constructs was also tested in Mdr2 knockout mouse (Mdr2−/− mice on the BALB/c background have been shown to demonstrate accelerated development of liver fibrosis, portal hypertension, and early cirrhosis compared to FVB mice carrying the same mutation (Ikenga et al., Am J Pathol. 2015, 185(2):325-34). In this study, mice began treatment with hABCB4 modRNA formulated in compound 1 lipid nanoparticles at 4 weeks of age. The treatment protocol lasted two weeks. The mice were injected intravenously (1 mg/kg) on days 0, 3, 7, 10, and 13. The mice were then sacrificed on day 14. Both serum and the liver were collected. As shown in FIG. 13, there was a greater level of recovery of phosphatidylcholine in the Mdr2 knockout mice. In addition, treatment of the mdr2 knockout mice with hABCB4 modRNA led to a significant reduction in serum total bile acid levels (FIG. 14). Also, as shown in FIGS. 15A-15C, the treatment led to significant improvements in body weight (FIG. 15A), liver enzymes (FIG. 15B), and portal vein blood pressure (FIG. 15C).

[1035] Fibrotic progression was also analyzed. Liver samples were subjected to Sirius Red staining (for connecting tissues) and collagen content was analyzed. The results are shown in FIG. 16. Real-time PCR (RT-PCR) was performed on the samples as well. Various markers of liver fibrosis and inflammation were examined. The results are shown in FIG. 17. Liver fibrosis was further analyzed using immunohistochemical staining. Specifically, CK-19 (cytokeratin 19), which is indicative of sclerosing cholangitis and Ki-67 (a marker of cell proliferation), and αvβ6 (an epithelial-specific integrin that is another important marker for fibrosis) were used. Alpha-smooth muscle actin (alpha-SMA) was also used as a marker of fibrosis. The results are shown in FIGS. 18A-18B. We have also examined inflammation markers F4/80 (for eosinophils) and CD11b (for leukocytes) to show the effect of hABCB4 modRNA on inflammation and immune cells infiltration. The results, together with a H&E staining, were shown in FIG. 18C. Our data suggest that repeat doses of hABCB4 modRNA significantly improved both fibrosis progression and hepatic inflammation (FIG. 18A-18C). FIG. 19 shows that multiple injections of hABCB4 modRNA improved the expression of hABCB4 protein in the canalicular domain.

### Example 14

### Characterization of Bile Salt Export Protein (BSEP) Activity

[1036] Studies were undertaken to examine BSEP activity. First, the half-life of human BSEP was determined in HepaRG cells modified by knocking out endogenous BSEP expression. Protein levels were measured using capillary electrophoresis with anti-ABCB11 for detection. The results are shown in FIG. 23.

[1037] In another study, the HepRG cells were plated on chamber slides for seven days. On day 7, the cells were transfected with GFP and hABCB11 mRNA on day 7. The transfected cells were fixed using 4% PFA on day 8 (24 hours following transfection) and immunocytohistochemistry was performed on Leica Bond Rx using the VECTAFLUOR™ Excel Amplified DYLIGHT® 594 anti-rabbit IgG kit. Representative images of the results are shown in FIG. 25. The experiment confirmed that B SEP was present in the transfected cells.

[1038] BSEP activity was measured in vitro. Titrated TCA was measured in the presence of a control (GFP) and expressed BSEP (mABCB11 and hABCB11). As shown in the lower panel of FIG. 24, both the hABCB11 and the mABCB11 had reduced bile acids at least four days post-transfection, as compared to the control (GFP).

[1039] BSEP activity was also measured in vivo. Wild-type mice were administered hABCB11 modRNA. 24 or 48 hours following administration, the subjects' livers were extracted and assayed for hABCB11. As shown in FIG. 26, the 24 h BSEP group had the largest response relative to the other experimental groups.

[1040] FIG. 27 depicts immunostained images showing protein expression in mice on a regular diet and on a model-inducing cholic acid (CA) diet. Note that protein is associated with membrane and expression was found to be increased in the cholic acid-fed mice.

[1041] The foregoing description of the specific embodiments will so fully reveal the general nature of the invention that others can, by applying knowledge within the skill of the art, readily modify and/or adapt for various applications such specific embodiments, without undue experimentation, without departing from the general concept of the present invention. Therefore, such adaptations and modifications are intended to be within the meaning and range of equivalents of the disclosed embodiments, based on the teaching and guidance presented herein. It is to be understood that the phraseology or terminology herein is for the purpose of description and not of limitation, such that the terminology or phraseology of the present specification is to be interpreted by the skilled artisan in light of the teachings and guidance. The breadth and scope of the present invention should not be limited by any of the above-described exemplary embodiments, but should be defined only in accordance with the following claims and their equivalents.

[1042] All publications, patent applications, patents, and other references mentioned herein are incorporated by reference in their entirety. In case of conflict, the present specification, including definitions, will control.

The application's sequence listing, which the Patent Office published only in electronic form, follows.

SEQUENCE LISTING (295 sequences)

SEQ ID NO: 1 - protein, 1286 aa, Homo sapiens
MDLEAAKNGTAWRPTSAEGDFELGISSKQKRKKTKTVKMIGVLTLFRYSDWQDKLFMSLGTIMAIAHGSGLPLMMIVFGEMTDKFVDTAGNFSFPVNFSLSLLNPGKILEEEMTRYAYYYSGLGAGVLVAAYIQVSFWTLAAGRQIRKIRQKFFHAILRQEIGWFDINDTTELNTRLTDDISKISEGIGDKVGMFFQAVATFFAGFIVGFIRGWKLTLVIMAISPILGLSAAVWAKILSAFSDKELAAYAKAGAVAEEALGAIRTVIAFGGQNKELERYQKHLENAKEIGIKKAISANISMGIAFLLIYASYALAFWYGSTLVISKEYTIGNAMTVFFSILIGAFSVGQAAPCIDAFANARGAAYVIFDIIDNNPKIDSFSERGHKPDSIKGNLEFNDVHFSYPSRANVKILKGLNLKVQSGQTVALVGSSGCGKSTTVQLIQRLYDPDEGTINIDGQDIRNFNVNYLREIIGVVSQEPVLFSTTIAENICYGRGNVTMDEIKKAVKEANAYEFIMKLPQKFDTLVGERGAQLSGGQKQRIAIARALVRNPKILLLDEATSALDTESEAEVQAALDKAREGRTTIVIAHRLSTVRNADVIAGFEDGVIVEQGSHSELMKKEGVYFKLVNMQTSGSQIQSEEFELNDEKAATRMAPNGWKSRLFRHSTQKNLKNSQMCQKSLDVETDGLEANVPPVSFLKVLKLNKTEWPYFVVGTVCAIANGGLQPAFSVIFSEIIAIFGPGDDAVKQQKCNIFSLIFLFLGIISFFTFFLQGFTFGKAGEILTRRLRSMAFKAMLRQDMSWFDDHKNSTGALSTRLATDAAQVQGATGTRLALIAQNIANLGTGIIISFIYGWQLTLLLLAVVPIIAVSGIVEMKLLAGNAKRDKKELEAAGKIATEAIENIRTVVSLTQERKFESMYVEKLYGPYRNSVQKAHIYGITFSISQAFMYFSYAGCFRFGAYLIVNGHMRFRDVILVFSAIVFGAVALGHASSFAPDYAKAKLSAAHLFMLFERQPLIDSYSEEGLKPDKFEGNITFNEVVFNYPTRANVPVLQGLSLEVKKGQTLALVGSSGCGKSTVVQLLERFYDPLAGTVFVDFGFQLLDGQEAKKLNVQWLRAQLGIVSQEPILFDCSIAENIAYGDNSRVVSQDEIVSAAKAANIHPFIETLPHKYETRVGDKGTQLSGGQKQRIAIARALIRQPQILLLDEATSALDTESEKVVQEALDKAREGRTCIVIAHRLSTIQNADLIVVFQNGRVKEHGTHQQLLAQKGIYFSMVSVQAGTQNL

SEQ ID NO: 2 - DNA, 3858 bp, Homo sapiens
atggatcttgaggcggcaaagaacggaacagcctggcgccccacgagcgcggagggcgactttgaactgggcatcagcagcaaacaaaaaaggaaaaaaacgaagacagtgaaaatgattggagtattaacattgtttcgatactccgattggcaggataaattgtttatgtcgctgggtaccatcatggccatagctcacggatcaggtctccccctcatgatgatagtatttggagagatgactgacaaatttgttgatactgcaggaaacttctcctttccagtgaacttttccttgtcgctgctaaatccaggcaaaattctggaagaagaaatgactagatatgcatattactactcaggattgggtgctggagttcttgttgctgcctatatacaagtttcattttggactttggcagctggtcgacagatcaggaaaattaggcagaagttttttcatgctattctacgacaggaaataggatggtttgacatcaacgacaccactgaactcaatacgcggctaacagatgacatctccaaaatcagtgaaggaattggtgacaaggttggaatgttctttcaagcagtagccacgttttttgcaggattcatagtgggattcatcagaggatggaagctcacccttgtgataatggccatcagccctattctaggactctctgcagccgtttgggcaaagatactctcggcatttagtgacaaagaactagctgcttatgcaaaagcaggcgccgtggcagaagaggctctgggggccatcaggactgtgatagctttcgggggccagaacaaagagctggaaaggtatcagaaacatttagaaaatgccaaagagattggaattaaaaaagctatttcagcaaacatttccatgggtattgccttcctgttaatatatgcatcatatgcactggccttctggtatggatccactctagtcatatcaaaagaatatactattggaaatgcaatgacagtttttttttcaatcctaattggagctttcagtgttggccaggctgccccatgtattgatgcttttgccaatgcaagaggagcagcatatgtgatctttgatattattgataataatcctaaaattgacagtttttcagagagaggacacaaaccagacagcatcaaagggaatttggagttcaatgatgttcacttttcttacccttctcgagctaacgtcaagatcttgaagggcctcaacctgaaggtgcagagtgggcagacggtggccctggttggaagtagtggctgtgggaagagcacaacggtccagctgatacagaggctctatgaccctgatgagggcacaattaacattgatgggcaggatattaggaactttaatgtaaactatctgagggaaatcattggtgtggtgagtcaggagccggtgctgttttccaccacaattgctgaaaatatttgttatggccgtggaaatgtaaccatggatgagataaagaaagctgtcaaagaggccaacgcctatgagtttatcatgaaattaccacagaaatttgacaccctggttggagagagaggggcccagctgagtggtgggcagaagcagaggatcgccattgcacgtgccctggttcgcaaccccaagatccttctgctggatgaggccacgtcagcattggacacagaaagtgaagctgaggtacaggcagctctggataaggccagagaaggccggaccaccattgtgatagcacaccgactgtctacggtccgaaatgcagatgtcatcgctgggtttgaggatggagtaattgtggagcaaggaagccacagcgaactgatgaagaaggaaggggtgtacttcaaacttgtcaacatgcagacatcaggaagccagatccagtcagaagaatttgaactaaatgatgaaaaggctgccactagaatggccccaaatggctggaaatctcgcctatttaggcattctactcagaaaaaccttaaaaattcacaaatgtgtcagaagagccttgatgtggaaaccgatggacttgaagcaaatgtgccaccagtgtcctttctgaaggtcctgaaactgaataaaacagaatggccctactttgtcgtgggaacagtatgtgccattgccaatggggggcttcagccggcattttcagtcatattctcagagatcatagcgatttttggaccaggcgatgatgcagtgaagcagcagaagtgcaacatattctctttgattttcttatttctgggaattatttctttttttactttcttccttcagggtttcacgtttgggaaagctggcgagatcctcaccagaagactgcggtcaatggcttttaaagcaatgctaagacaggacatgagctggtttgatgaccataaaaacagtactggtgcactttctacaagacttgccacagatgctgcccaagtccaaggagccacaggaaccaggttggctttaattgcacagaatatagctaaccttggaactggtattatcatatcatttatctacggttggcagttaaccctattgctattagcagttgttccaattattgctgtgtcaggaattgttgaaatgaaattgttggctggaaatgccaaaagagataaaaaagaactggaagctgctggaaagattgcaacagaggcaatagaaaatattaggacagttgtgtctttgacccaggaaagaaaatttgaatcaatgtatgttgaaaaattgtatggaccttacaggaattctgtgcagaaggcacacatctatggaattacttttagtatctcacaagcatttatgtatttttcctatgccggttgttttcgatttggtgcatatctcattgtgaatggacatatgcgcttcagagatgttattctggtgttttctgcaattgtatttggtgcagtggctctaggacatgccagttcatttgctccagactatgctaaagctaagctgtctgcagcccacttattcatgctgtttgaaagacaacctctgattgacagctacagtgaagaggggctgaagcctgataaatttgaaggaaatataacatttaatgaagtcgtgttcaactatcccacccgagcaaacgtgccagtgcttcaggggctgagcctggaggtgaagaaaggccagacactagccctggtgggcagcagtggctgtgggaagagcacggtggtccagctcctggagcggttctacgaccccttggcggggacagtgtttgtggactttggttttcagcttctcgatggtcaagaagcaaagaaactcaatgtccagtggctcagagctcaactcggaatcgtgtctcaggagcctatcctatttgactgcagcattgccgagaatattgcctatggagacaacagccgggttgtatcacaggatgaaattgtgagtgcagccaaagctgccaacatacatcctttcatcgagacgttaccccacaaatatgaaacaagagtgggagataaggggactcagctctcaggaggtcaaaaacagaggattgctattgcccgagccctcatcagacaacctcaaatcctcctgttggatgaagctacatcagctctggatactgaaagtgaaaaggttgtccaagaagccctggacaaagccagagaaggccgcacctgcattgtgattgctcaccgcctgtccaccatccagaatgcagacttaatagtggtgtttcagaatgggagagtcaaggagcatggcacgcatcagcagctgctggcacagaaaggcatctatttttcaatggtcagtgtccaggctgggacacagaactta

SEQ ID NO: 3 - protein, 1279 aa, Homo sapiens
MDLEAAKNGTAWRPTSAEGDFELGISSKQKRKKTKTVKMIGVLTLFRYSDWQDKLFMSLGTIMAIAHGSGLPLMMIVFGEMTDKFVDTAGNFSFPVNFSLSLLNPGKILEEEMTRYAYYYSGLGAGVLVAAYIQVSFWTLAAGRQIRKIRQKFFHAILRQEIGWFDINDTTELNTRLTDDISKISEGIGDKVGMFFQAVATFFAGFIVGFIRGWKLTLVIMAISPILGLSAAVWAKILSAFSDKELAAYAKAGAVAEEALGAIRTVIAFGGQNKELERYQKHLENAKEIGIKKAISANISMGIAFLLIYASYALAFWYGSTLVISKEYTIGNAMTVFFSILIGAFSVGQAAPCIDAFANARGAAYVIFDIIDNNPKIDSFSERGHKPDSIKGNLEFNDVHFSYPSRANVKILKGLNLKVQSGQTVALVGSSGCGKSTTVQLIQRLYDPDEGTINIDGQDIRNFNVNYLREIIGVVSQEPVLFSTTIAENICYGRGNVTMDEIKKAVKEANAYEFIMKLPQKFDTLVGERGAQLSGGQKQRIAIARALVRNPKILLLDEATSALDTESEAEVQAALDKAREGRTTIVIAHRLSTVRNADVIAGFEDGVIVEQGSHSELMKKEGVYFKLVNMQTSGSQIQSEEFELNDEKAATRMAPNGWKSRLFRHSTQKNLKNSQMCQKSLDVETDGLEANVPPVSFLKVLKLNKTEWPYFVVGTVCAIANGGLQPAFSVIFSEIIAIFGPGDDAVKQQKCNIFSLIFLFLGIISFFTFFLQGFTFGKAGEILTRRLRSMAFKAMLRQDMSWFDDHKNSTGALSTRLATDAAQVQGATGTRLALIAQNIANLGTGIIISFIYGWQLTLLLLAVVPIIAVSGIVEMKLLAGNAKRDKKELEAAGKIATEAIENIRTVVSLTQERKFESMYVEKLYGPYRNSVQKAHIYGITFSISQAFMYFSYAGCFRFGAYLIVNGHMRFRDVILVFSAIVFGAVALGHASSFAPDYAKAKLSAAHLFMLFERQPLIDSYSEEGLKPDKFEGNITFNEVVFNYPTRANVPVLQGLSLEVKKGQTLALVGSSGCGKSTVVQLLERFYDPLAGTVLLDGQEAKKLNVQWLRAQLGIVSQEPILFDCSIAENIAYGDNSRVVSQDEIVSAAKAANIHPFIETLPHKYETRVGDKGTQLSGGQKQRIAIARALIRQPQILLLDEATSALDTESEKVVQEALDKAREGRTCIVIAHRLSTIQNADLIVVFQNGRVKEHGTHQQLLAQKGIYFSMVSVQAGTQNL

SEQ ID NO: 4 - DNA, 3837 bp, Homo sapiens
atggatcttgaggcggcaaagaacggaacagcctggcgccccacgagcgcggagggcgactttgaactgggcatcagcagcaaacaaaaaaggaaaaaaacgaagacagtgaaaatgattggagtattaacattgtttcgatactccgattggcaggataaattgtttatgtcgctgggtaccatcatggccatagctcacggatcaggtctccccctcatgatgatagtatttggagagatgactgacaaatttgttgatactgcaggaaacttctcctttccagtgaacttttccttgtcgctgctaaatccaggcaaaattctggaagaagaaatgactagatatgcatattactactcaggattgggtgctggagttcttgttgctgcctatatacaagtttcattttggactttggcagctggtcgacagatcaggaaaattaggcagaagttttttcatgctattctacgacaggaaataggatggtttgacatcaacgacaccactgaactcaatacgcggctaacagatgacatctccaaaatcagtgaaggaattggtgacaaggttggaatgttctttcaagcagtagccacgttttttgcaggattcatagtgggattcatcagaggatggaagctcacccttgtgataatggccatcagccctattctaggactctctgcagccgtttgggcaaagatactctcggcatttagtgacaaagaactagctgcttatgcaaaagcaggcgccgtggcagaagaggctctgggggccatcaggactgtgatagctttcgggggccagaacaaagagctggaaaggtatcagaaacatttagaaaatgccaaagagattggaattaaaaaagctatttcagcaaacatttccatgggtattgccttcctgttaatatatgcatcatatgcactggccttctggtatggatccactctagtcatatcaaaagaatatactattggaaatgcaatgacagtttttttttcaatcctaattggagctttcagtgttggccaggctgccccatgtattgatgcttttgccaatgcaagaggagcagcatatgtgatctttgatattattgataataatcctaaaattgacagtttttcagagagaggacacaaaccagacagcatcaaagggaatttggagttcaatgatgttcacttttcttacccttctcgagctaacgtcaagatcttgaagggcctcaacctgaaggtgcagagtgggcagacggtggccctggttggaagtagtggctgtgggaagagcacaacggtccagctgatacagaggctctatgaccctgatgagggcacaattaacattgatgggcaggatattaggaactttaatgtaaactatctgagggaaatcattggtgtggtgagtcaggagccggtgctgttttccaccacaattgctgaaaatatttgttatggccgtggaaatgtaaccatggatgagataaagaaagctgtcaaagaggccaacgcctatgagtttatcatgaaattaccacagaaatttgacaccctggttggagagagaggggcccagctgagtggtgggcagaagcagaggatcgccattgcacgtgccctggttcgcaaccccaagatccttctgctggatgaggccacgtcagcattggacacagaaagtgaagctgaggtacaggcagctctggataaggccagagaaggccggaccaccattgtgatagcacaccgactgtctacggtccgaaatgcagatgtcatcgctgggtttgaggatggagtaattgtggagcaaggaagccacagcgaactgatgaagaaggaaggggtgtacttcaaacttgtcaacatgcagacatcaggaagccagatccagtcagaagaatttgaactaaatgatgaaaaggctgccactagaatggccccaaatggctggaaatctcgcctatttaggcattctactcagaaaaaccttaaaaattcacaaatgtgtcagaagagccttgatgtggaaaccgatggacttgaagcaaatgtgccaccagtgtcctttctgaaggtcctgaaactgaataaaacagaatggccctactttgtcgtgggaacagtatgtgccattgccaatggggggcttcagccggcattttcagtcatattctcagagatcatagcgatttttggaccaggcgatgatgcagtgaagcagcagaagtgcaacatattctctttgattttcttatttctgggaattatttctttttttactttcttccttcagggtttcacgtttgggaaagctggcgagatcctcaccagaagactgcggtcaatggcttttaaagcaatgctaagacaggacatgagctggtttgatgaccataaaaacagtactggtgcactttctacaagacttgccacagatgctgcccaagtccaaggagccacaggaaccaggttggctttaattgcacagaatatagctaaccttggaactggtattatcatatcatttatctacggttggcagttaaccctattgctattagcagttgttccaattattgctgtgtcaggaattgttgaaatgaaattgttggctggaaatgccaaaagagataaaaaagaactggaagctgctggaaagattgcaacagaggcaatagaaaatattaggacagttgtgtctttgacccaggaaagaaaatttgaatcaatgtatgttgaaaaattgtatggaccttacaggaattctgtgcagaaggcacacatctatggaattacttttagtatctcacaagcatttatgtatttttcctatgccggttgttttcgatttggtgcatatctcattgtgaatggacatatgcgcttcagagatgttattctggtgttttctgcaattgtatttggtgcagtggctctaggacatgccagttcatttgctccagactatgctaaagctaagctgtctgcagcccacttattcatgctgtttgaaagacaacctctgattgacagctacagtgaagaggggctgaagcctgataaatttgaaggaaatataacatttaatgaagtcgtgttcaactatcccacccgagcaaacgtgccagtgcttcaggggctgagcctggaggtgaagaaaggccagacactagccctggtgggcagcagtggctgtgggaagagcacggtggtccagctcctggagcggttctacgaccccttggcggggacagtgcttctcgatggtcaagaagcaaagaaactcaatgtccagtggctcagagctcaactcggaatcgtgtctcaggagcctatcctatttgactgcagcattgccgagaatattgcctatggagacaacagccgggttgtatcacaggatgaaattgtgagtgcagccaaagctgccaacatacatcctttcatcgagacgttaccccacaaatatgaaacaagagtgggagataaggggactcagctctcaggaggtcaaaaacagaggattgctattgcccgagccctcatcagacaacctcaaatcctcctgttggatgaagctacatcagctctggatactgaaagtgaaaaggttgtccaagaagccctggacaaagccagagaaggccgcacctgcattgtgattgctcaccgcctgtccaccatccagaatgcagacttaatagtggtgtttcagaatgggagagtcaaggagcatggcacgcatcagcagctgctggcacagaaaggcatctatttttcaatggtcagtgtccaggctgggacacagaactta

SEQ ID NO: 5 - protein, 1232 aa, Homo sapiens
MDLEAAKNGTAWRPTSAEGDFELGISSKQKRKKTKTVKMIGVLTLFRYSDWQDKLFMSLGTIMAIAHGSGLPLMMIVFGEMTDKFVDTAGNFSFPVNFSLSLLNPGKILEEEMTRYAYYYSGLGAGVLVAAYIQVSFWTLAAGRQIRKIRQKFFHAILRQEIGWFDINDTTELNTRLTDDISKISEGIGDKVGMFFQAVATFFAGFIVGFIRGWKLTLVIMAISPILGLSAAVWAKILSAFSDKELAAYAKAGAVAEEALGAIRTVIAFGGQNKELERYQKHLENAKEIGIKKAISANISMGIAFLLIYASYALAFWYGSTLVISKEYTIGNAMTVFFSILIGAFSVGQAAPCIDAFANARGAAYVIFDIIDNNPKIDSFSERGHKPDSIKGNLEFNDVHFSYPSRANVKILKGLNLKVQSGQTVALVGSSGCGKSTTVQLIQRLYDPDEGTINIDGQDIRNFNVNYLREIIGVVSQEPVLFSTTIAENICYGRGNVTMDEIKKAVKEANAYEFIMKLPQKFDTLVGERGAQLSGGQKQRIAIARALVRNPKILLLDEATSALDTESEAEVQAALDKAREGRTTIVIAHRLSTVRNADVIAGFEDGVIVEQGSHSELMKKEGVYFKLVNMQTSGSQIQSEEFELNDEKAATRMAPNGWKSRLFRHSTQKNLKNSQMCQKSLDVETDGLEANVPPVSFLKVLKLNKTEWPYFVVGTVCAIANGGLQPAFSVIFSEIIAIFGPGDDAVKQQKCNIFSLIFLFLGIISFFTFFLQGFTFGKAGEILTRRLRSMAFKAMLRQDMSWFDDHKNSTGALSTRLATDAAQVQGATGTRLALIAQNIANLGTGIIISFIYGWQLTLLLLAVVPIIAVSGIVEMKLLAGNAKRDKKELEAAGKIATEAIENIRTVVSLTQERKFESMYVEKLYGPYRVFSAIVFGAVALGHASSFAPDYAKAKLSAAHLFMLFERQPLIDSYSEEGLKPDKFEGNITFNEVVFNYPTRANVPVLQGLSLEVKKGQTLALVGSSGCGKSTVVQLLERFYDPLAGTVLLDGQEAKKLNVQWLRAQLGIVSQEPILFDCSIAENIAYGDNSRVVSQDEIVSAAKAANIHPFIETLPHKYETRVGDKGTQLSGGQKQRIAIARALIRQPQILLLDEATSALDTESEKVVQEALDKAREGRTCIVIAHRLSTIQNADLIVVFQNGRVKEHGTHQQLLAQKGIYFSMVSVQAGTQNL

SEQ ID NO: 6 - DNA, 3837 bp, Homo sapiens; identical to SEQ ID NO: 4

SEQ ID NO: 7 - protein, 1321 aa, Homo sapiens
MSDSVILRSIKKFGEENDGFESDKSYNNDKKSRLQDEKKGDGVRVGFFQLFRFSSSTDIWLMFVGSLCAFLHGIAQPGVLLIFGTMTDVFIDYDVELQELQIPGKACVNNTIVWTNSSLNQNMTNGTRCGLLNIESEMIKFASYYAGIAVAVLITGYIQICFWVIAAARQIQKMRKFYFRRIMRMEIGWFDCNSVGELNTRFSDDINKINDAIADQMALFIQRMTSTICGFLLGFFRGWKLTLVIISVSPLIGIGAATIGLSVSKFTDYELKAYAKAGVVADEVISSMRTVAAFGGEKREVERYEKNLVFAQRWGIRKGIVMGFFTGFVWCLIFLCYALAFWYGSTLVLDEGEYTPGTLVQIFLSVIVGALNLGNASPCLEAFATGRAAATSIFETIDRKPIIDCMSEDGYKLDRIKGEIEFHNVTFHYPSRPEVKILNDLNMVIKPGEMTALVGPSGAGKSTALQLIQRFYDPCEGMVTVDGHDIRSLNIQWLRDQIGIVEQEPVLFSTTIAENIRYGREDATMEDIVQAAKEANAYNFIMDLPQQFDTLVGEGGGQMSGGQKQRVAIARALIRNPKILLLDMATSALDNESEAMVQEVLSKIQHGHTIISVAHRLSTVRAADTIIGFEHGTAVERGTHEELLERKGVYFTLVTLQSQGNQALNEEDIKDATEDDMLARTFSRGSYQDSLRASIRQRSKSQLSYLVHEPPLAVVDHKSTYEEDRKDKDIPVQEEVEPAPVRRILKFSAPEWPYMLVGSVGAAVNGTVTPLYAFLFSQILGTFSIPDKEEQRSQINGVCLLFVAMGCVSLFTQFLQGYAFAKSGELLTKRLRKFGFRAMLGQDIAWFDDLRNSPGALTTRLATDASQVQGAAGSQIGMIVNSFTNVTVAMIIAFSFSWKLSLVILCFFPFLALSGATQTRMLTGFASRDKQALEMVGQITNEALSNIRTVAGIGKERRFIEALETELEKPFKTAIQKANIYGFCFAFAQCIMFIANSASYRYGGYLISNEGLHFSYVFRVISAVVLSATALGRAFSYTPSYAKAKISAARFFQLLDRQPPISVYNTAGEKWDNFQGKIDFVDCKFTYPSRPDSQVLNGLSVSISPGQTLAFVGSSGCGKSTSIQLLERFYDPDQGKVMIDGHDSKKVNVQFLRSNIGIVSQEPVLFACSIMDNIKYGDNTKEIPMERVIAAAKQAQLHDFVMSLPEKYETNVGSQGSQLSRGEKQRIAIARAIVRDPKILLLDEATSALDTESEKTVQVALDKAREGRTCIVIAHRLSTIQNADIIAVMAQGVVIEKGTHEELMAQKGAYYKLVTTGSPIS

SEQ ID NO: 8 - DNA, 6934 bp, Homo sapiens
agaatgatgaaaaccgaggttggaaaaggttgtgaaaccttttaactctccacagtggagtccattatttcctctggcttcctcaaattcatattcacagggtcgttggctgtgggttgcaattaccatgtctgactcagtaattcttcgaagtataaagaaatttggagaggagaatgatggttttgagtcagataaatcatataataatgataagaaatcaaggttacaagatgagaagaaaggtgatggcgttagagttggcttctttcaattgtttcggttttcttcatcaactgacatttggctgatgtttgtgggaagtttgtgtgcatttctccatggaatagcccagccaggcgtgctactcatttttggcacaatgacagatgtttttattgactacgacgttgagttacaagaactccagattccaggaaaagcatgtgtgaataacaccattgtatggactaacagttccctcaaccagaacatgacaaatggaacacgttgtgggttgctgaacatcgagagcgaaatgatcaaatttgccagttactatgctggaattgctgtcgcagtacttatcacaggatatattcaaatatgcttttgggtcattgccgcagctcgtcagatacagaaaatgagaaaattttactttaggagaataatgagaatggaaatagggtggtttgactgcaattcagtgggggagctgaatacaagattctctgatgatattaataaaatcaatgatgccatagctgaccaaatggcccttttcattcagcgcatgacctcgaccatctgtggtttcctgttgggatttttcaggggttggaaactgaccttggttattatttctgtcagccctctcattgggattggagcagccaccattggtctgagtgtgtccaagtttacggactatgagctgaaggcctatgccaaagcaggggtggtggctgatgaagtcatttcatcaatgagaacagtggctgcttttggtggtgagaaaagagaggttgaaaggtatgagaaaaatcttgtgttcgcccagcgttggggaattagaaaaggaatagtgatgggattctttactggattcgtgtggtgtctcatctttttgtgttatgcactggccttctggtacggctccacacttgtcctggatgaaggagaatatacaccaggaacccttgtccagattttcctcagtgtcatagtaggagctttaaatcttggcaatgcctctccttgtttggaagcctttgcaactggacgtgcagcagccaccagcatttttgagacaatagacaggaaacccatcattgactgcatgtcagaagatggttacaagttggatcgaatcaagggtgaaattgaattccataatgtgaccttccattatccttccagaccagaggtgaagattctaaatgacctcaacatggtcattaaaccaggggaaatgacagctctggtaggacccagtggagctggaaaaagtacagcactgcaactcattcagcgattctatgacccctgtgaaggaatggtgaccgtggatggccatgacattcgctctcttaacattcagtggcttagagatcagattgggatagtggagcaagagccagttctgttctctaccaccattgcagaaaatattcgctatggcagagaagatgcaacaatggaagacatagtccaagctgccaaggaggccaatgcctacaacttcatcatggacctgccacagcaatttgacacccttgttggagaaggaggaggccagatgagtggtggccagaaacaaagggtagctatcgccagagccctcatccgaaatcccaagattctgcttttggacatggccacctcagctctggacaatgagagtgaagccatggtgcaagaagtgctgagtaagattcagcatgggcacacaatcatttcagttgctcatcgcttgtctacggtcagagctgcagataccatcattggttttgaacatggcactgcagtggaaagagggacccatgaagaattactggaaaggaaaggtgtttacttcactctagtgactttgcaaagccagggaaatcaagctcttaatgaagaggacataaaggatgcaactgaagatgacatgcttgcgaggacctttagcagagggagctaccaggatagtttaagggcttccatccggcaacgctccaagtctcagctttcttacctggtgcacgaacctccattagctgttgtagatcataagtctacctatgaagaagatagaaaggacaaggacattcctgtgcaggaagaagttgaacctgccccagttaggaggattctgaaattcagtgctccagaatggccctacatgctggtagggtctgtgggtgcagctgtgaacgggacagtcacacccttgtatgcctttttattcagccagattcttgggactttttcaattcctgataaagaggaacaaaggtcacagatcaatggtgtgtgcctactttttgtagcaatgggctgtgtatctcttttcacccaatttctacagggatatgcctttgctaaatctggggagctcctaacaaaaaggctacgtaaatttggtttcagggcaatgctggggcaagatattgcctggtttgatgacctcagaaatagccctggagcattgacaacaagacttgctacagatgcttcccaagttcaaggggctgccggctctcagatcgggatgatagtcaattccttcactaacgtcactgtggccatgatcattgccttctcctttagctggaagctgagcctggtcatcttgtgcttcttccccttcttggctttatcaggagccacacagaccaggatgttgacaggatttgcctctcgagataagcaggccctggagatggtgggacagattacaaatgaagccctcagtaacatccgcactgttgctggaattggaaaggagaggcggttcattgaagcacttgagactgagctggagaagcccttcaagacagccattcagaaagccaatatttacggattctgctttgcctttgcccagtgcatcatgtttattgcgaattctgcttcctacagatatggaggttacttaatctccaatgaggggctccatttcagctatgtgttcagggtgatctctgcagttgtactgagtgcaacagctcttggaagagccttctcttacaccccaagttatgcaaaagctaaaatatcagctgcacgcttttttcaactgctggaccgacaacccccaatcagtgtatacaatactgcaggtgaaaaatgggacaacttccaggggaagattgattttgttgattgtaaatttacatatccttctcgacctgactcgcaagttctgaatggtctctcagtgtcgattagtccagggcagacactggcgtttgttgggagcagtggatgtggcaaaagcactagcattcagctgttggaacgtttctatgatcctgatcaagggaaggtgatgatagatggtcatgacagcaaaaaagtaaatgtccagttcctccgctcaaacattggaattgtttcccaggaaccagtgttgtttgcctgtagcataatggacaatatcaagtatggagacaacaccaaagaaattcccatggaaagagtcatagcagctgcaaaacaggctcagctgcatgattttgtcatgtcactcccagagaaatatgaaactaacgttgggtcccaggggtctcaactctctagaggggagaaacaacgcattgctattgctcgggccattgtacgagatcctaaaatcttgctactagatgaagccacttctgccttagacacagaaagtgaaaagacggtgcaggttgctctagacaaagccagagagggtcggacctgcattgtcattgcccatcgcttgtccaccatccagaacgcggatatcattgctgtcatggcacagggggtggtgattgaaaaggggacccatgaagaactgatggcccaaaaaggagcctactacaaactagtcaccactggatcccccatcagttgacccaatgcaagaatctcagacacacatgacgcaccagttacaggggttgtttttaaagaaaaaaacaatcccagcaggagggattgctgggattgttttttctttaaagaagaatgttaatattttacttttacagtcattttcctacatcggaatccaagctaatttctaatggccttccataataattctgctttagatgtgtatacagaaaatgaaagaaactagggtccatatgagggaaaacccaatgtcaagtggcagctcagccaccactcagtgcttctctgtgcaggagccagtcctgattaatatgtgggaattagtgagacatcagggagtaagtgacactttgaactcctcaagggcagagaactgtctttcatttttgaaccctcggtgtacacagaggcgggtctataacaggcaatcaacaaacgtttcttgagctagaccaaggtcagatttgaaaagaacagaaggactgaagaccagctgtgtttcttaactaaatttgtctttcaagtgaaaccagcttccttcatctctaaggctaaggatagggaaagggtggatgctctcaggctgagggaggcagaaagggaaagtattagcatgagctttccagttagggctgttgatttatgctttaacttcagagtgagtgtaggggtggtgatgctaccattactgtgaggacctaccagtgtggctggagcagggactctctcccaggccttttactcctcagcacctccctgcatactgattgttgtttttagtttctgtgaaattatattcatgaaatgaaaatagcgcattttactttgctgtagtttcataaggttttatacaaaaaagcaagtaaatatggcagaaaagcactcatttgcccctgctccctcaaaacaccacagaatgacatagaactaaaggcggcaggaatctacaagaatgaagaaaacacagtgatgccacctgcaaaatcttgggagccagaaagcaaatggacaattgataatagagttacaagatgagagaaaacaaaaatgtaacctgttagttgggggagcctagaaacatcctgttttgtaccacagacccctagaaagtttcaagatgtaaaaacactggatccttctggaaggaggagacaaggggacagagggactgaagacagaagaatggaccaaaagcctgtatggaaacagaattgcagagccccgcctgcagcaggatggctgcctttccccagttccagcgagaaactgcatactccctctctgaggaggctcacagggaggtttgcacttagagacacaagatgaagttgaaggggcagctaacatacaagagacagggggattgaatgtaaagctgtgtatgaacagaagaactcccagcccctctcttctggcaggagattgaagaatgattttctggggaaattggccaatcttagaaaagaggtcgggccaggcgctgtggctcactcctgtaatcccagcactttgggaggccaaggcgggcggatcatgaggtcgagagattgagaccatcctggctaacatggtgaaaccccgtctctactaaaaatacaaaaaaattagccgggcgtggtggcgggcgcctgtagtcccagctactcaggaggctgaggcaggagaatggcgtgaacccgggaggtggagcttgcagtgagccgagatcgcgccactgcactccagcctgggcgacagagcgaaaaaaaaaaaaaaagaaaaagaaaaagaaaagaggtcaaggactccgtccttggaatcctaagaaaattttccagccgtattacccttctatgaagcccacctgtcaaccaacaagcacccactcgatcagagcttccccaggctttttggtgtctcctccttgcatgggaattgacttccaaggaccaccagacactgaggaagtattttaacatataaagcaaaagcaacaatagggcagctggagaaaggaaattagaagtaacagagccaatgcagtgattagaaaaacactcaaaaaatggtaataaatgtgttcaatgggtcaagagaacatatttccatctatttaaataaaaacaggaatcaataaaagtgaacatacaaaaaagagctcttgtcacagaaatgaaaaccttgggagcaggactgcacccacggttcccaccaacctatcctgccatcatgttttctccctactccagcttcctcccaagctcactctacgtagatggtttttcttcccttagccaacaaacgaaattctgcctataaattaagccaggacactaggatatggaggtatattatttatgtctcttttccagtgtttcctggtatataacagcaaagatggtttagcaagttaactggtcaggccagaattcttgatggttgccaagtcaggaggcagacggtgaaggaatgcattctggttatgaaaaatggcaatgacgagtaagttgcagagtaaagatgccttttagaggaaattaaggtttgcaataaatgcatgctaatcctctaattttgatgaaagactaaagctcttgttttggtttgcatttcaaagagcaagagcataggctcttgtgctgggaggtggccagtttcctggaaaggaatttatggagtctgaaagaggaattagtacaaattatattttcaaataagatacttgaaagttattgatgacagggaaaagattgtctaaagagggcttgaaattggggaaataattgaggctcagtgacaaaggagaagattacaacttcaaaaatgaataaataaataacattgcatgtttattttacaa

SEQ ID NO: 9 - protein, 1251 aa, Homo sapiens
MSTERDSETTFDEDSQPNDEVVPYSDDETEDELDDQGSAVEPEQNRVNREAEENREPFRKECTWQVKANDRKYHEQPHFMNTKFLCIKESKYANNAIKTYKYNAFTFIPMNLFEQFKRAANLYFLALLILQAVPQISTLAWYTTLVPLLVVLGVTAIKDLVDDVARHKMDKEINNRTCEVIKDGRFKVAKWKEIQVGDVIRLKKNDFVPADILLLSSSEPNSLCYVETAELDGETNLKFKMSLEITDQYLQREDTLATFDGFIECEEPNNRLDKFTGTLFWRNTSFPLDADKILLRGCVIRNTDFCHGLVIFAGADTKIMKNSGKTRFKRTKIDYLMNYMVYTIFVVLILLSAGLAIGHAYWEAQVGNSSWYLYDGEDDTPSYRGFLIFWGYIIVLNTMVPISLYVSVEVIRLGQSHFINWDLQMYYAEKDTPAKARTTTLNEQLGQIHYIFSDKTGTLTQNIMTFKKCCINGQIYGDHRDASQHNHNKIEQVDFSWNTYADGKLAFYDHYLIEQIQSGKEPEVRQFFFLLAVCHTVMVDRTDGQLNYQAASPDEGALVNAARNFGFAFLARTQNTITISELGTERTYNVLAILDFNSDRKRMSIIVRTPEGNIKLYCKGADTVIYERLHRMNPTKQETQDALDIFANETLRTLCLCYKEIEEKEFTEWNKKFMAASVASTNRDEALDKVYEEIEKDLILLGATAIEDKLQDGVPETISKLAKADIKIWVLTGDKKETAENIGFACELLTEDTTICYGEDINSLLHARMENQRNRGGVYAKFAPPVQESFFPPGGNRALIITGSWLNEILLEKKTKRNKILKLKFPRTEEERRMRTQSKRRLEAKKEQRQKNFVDLACECSAVICCRVTPKQKAMVVDLVKRYKKAITLAIGDGANDVNMIKTAHIGVGISGQEGMQAVMSSDYSFAQFRYLQRLLLVHGRWSYIRMCKFLRYFFYKNFAFTLVHFWYSFFNGYSAQTAYEDWFITLYNVLYTSLPVLLMGLLDQDVSDKLSLRFPGLYIVGQRDLLFNYKRFFVSLLHGVLTSMILFFIPLGAYLQTVGQDGEAPSDYQSFAVTIASALVITVNFQIGLDTSYWTFVNAFSIFGSIALYFGIMFDFHSAGIHVLFPSAFQFTGTASNALRQPYIWLTIILAVAVCLLPVVAIRFLSMTIWPSESDKIQKHRKRLKAEEQWQRRQQVFRRGVSTRRSAYAFSHQRGYADLISSGRSIRKKRSPLDAIVADGTAEYRRTGDS

SEQ ID NO: 10 - DNA, 3753 bp, Homo sapiens
atgagtacagaaagagactcagaaacgacatttgacgaggattctcagcctaatgacgaagtggttccctacagtgatgatgaaacagaagatgaacttgatgaccaggggtctgctgttgaaccagaacaaaaccgagtcaacagggaagcagaggagaaccgggagccattcagaaaagaatgtacatggcaagtcaaagcaaacgatcgcaagtaccacgaacaacctcactttatgaacacaaaattcttgtgtattaaggagagtaaatatgcgaataatgcaattaaaacatacaagtacaacgcatttacctttataccaatgaatctgtttgagcagtttaagagagcagccaatttatatttcctggctcttcttatcttacaggcagttcctcaaatctctaccctggcttggtacaccacactagtgcccctgcttgtggtgctgggcgtcactgcaatcaaagacctggtggacgatgtggctcgccataaaatggataaggaaatcaacaataggacgtgtgaagtcattaaggatggcaggttcaaagttgctaagtggaaagaaattcaagttggagacgtcattcgtctgaaaaaaaatgattttgttccagctgacattctcctgctgtctagctctgagcctaacagcctctgctatgtggaaacagcagaactggatggagaaaccaatttaaaatttaagatgtcacttgaaatcacagaccagtacctccaaagagaagatacattggctacatttgatggttttattgaatgtgaagaacccaataacagactagataagtttacaggaacactattttggagaaacacaagttttcctttggatgctgataaaattttgttacgtggctgtgtaattaggaacaccgatttctgccacggcttagtcatttttgcaggtgctgacactaaaataatgaagaatagtgggaaaaccagatttaaaagaactaaaattgattacttgatgaactacatggtttacacgatctttgttgttcttattctgctttctgctggtcttgccatcggccatgcttattgggaagcacaggtgggcaattcctcttggtacctctatgatggagaagacgatacaccctcctaccgtggattcctcattttctggggctatatcattgttctcaacaccatggtacccatctctctctatgtcagcgtggaagtgattcgtcttggacagagtcacttcatcaactgggacctgcaaatgtactatgctgagaaggacacacccgcaaaagctagaaccaccacactcaatgaacagctcgggcagatccattatatcttctctgataagacggggacactcacacaaaatatcatgacctttaaaaagtgctgtatcaacgggcagatatatggggaccatcgggatgcctctcaacacaaccacaacaaaatagagcaagttgattttagctggaatacatatgctgatgggaagcttgcattttatgaccactatcttattgagcaaatccagtcagggaaagagccagaagtacgacagttcttcttcttgctcgcagtttgccacacagtcatggtggataggactgatggtcagctcaactaccaggcagcctctcccgatgaaggtgccctggtaaacgctgccaggaactttggctttgccttcctcgccaggacccagaacaccatcaccatcagtgaactgggcactgaaaggacttacaatgttcttgccattttggacttcaacagtgaccggaagcgaatgtctatcattgtaagaaccccagaaggcaatatcaagctttactgtaaaggtgctgacactgttatttatgaacggttacatcgaatgaatcctactaagcaagaaacacaggatgccctggatatctttgcaaatgaaactcttagaaccctatgcctttgctacaaggaaattgaagaaaaagaatttacagaatggaataaaaagtttatggctgccagtgtggcctccaccaaccgggacgaagctctggataaagtatatgaggagattgaaaaagacttaattctcctgggagctacagctattgaagacaagctacaggatggagttccagaaaccatttcaaaacttgcaaaagctgacattaagatctgggtgcttactggagacaaaaaggaaactgctgaaaatataggatttgcttgtgaacttctgactgaagacaccaccatctgctatggggaggatattaattctcttcttcatgcaaggatggaaaaccagaggaatagaggtggcgtctacgcaaagtttgcacctcctgtgcaggaatctttttttccacccggtggaaaccgtgccttaatcatcactggttcttggttgaatgaaattcttctcgagaaaaagaccaagagaaataagattctgaagctgaagttcccaagaacagaagaagaaagacggatgcggacccaaagtaaaaggaggctagaagctaagaaagagcagcggcagaaaaactttgtggacctggcctgcgagtgcagcgcagtcatctgctgccgcgtcacccccaagcagaaggccatggtggtggacctggtgaagaggtacaagaaagccatcacgctggccatcggagatggggccaatgacgtgaacatgatcaaaactgcccacattggcgttggaataagtggacaagaaggaatgcaagctgtcatgtcgagtgactattcctttgctcagttccgatatctgcagaggctactgctggtgcatggccgatggtcttacataaggatgtgcaagttcctacgatacttcttttacaaaaactttgcctttactttggttcatttctggtactccttcttcaatggctactctgcgcagactgcatacgaggattggttcatcaccctctacaacgtgctgtacaccagcctgcccgtgctcctcatggggctgctcgaccaggatgtgagtgacaaactgagcctccgattccctgggttatacatagtgggacaaagagacttactattcaactataagagattctttgtaagcttgttgcatggggtcctaacatcgatgatcctcttcttcatacctcttggagcttatctgcaaaccgtagggcaggatggagaggcaccttccgactaccagtcttttgccgtcaccattgcctctgctcttgtaataacagtcaatttccagattggcttggatacttcttattggacttttgtgaatgctttttcaatttttggaagcattgcactttattttggcatcatgtttgactttcatagtgctggaatacatgttctctttccatctgcatttcaatttacaggcacagcttcaaacgctctgagacagccatacatttggttaactatcatcctggctgttgctgtgtgcttactacccgtcgttgccattcgattcctgtcaatgaccatctggccatcagaaagtgataagatccagaagcatcgcaagcggttgaaggcggaggagcagtggcagcgacggcagcaggtgttccgccggggcgtgtcaacgcggcgctcggcctacgccttctcgcaccagcggggctacgcggacctcatctcctccgggcgcagcatccgcaagaagcgctcgccgcttgatgccatcgtggcggatggcaccgcggagtacaggcgcaccggggacagc

SEQ ID NO: 11 - protein, 5 aa, Artificial Sequence
  Synthetic Polypeptide
GGGGS

SEQ ID NO: 12 - RNA, 47 nt, Artificial Sequence
  Synthetic Polynucleotide
gggaaauaagagagaaaagaagaguaagaagaaauauaagagccacc

SEQ ID NO: 13 - RNA, 119 nt, Artificial Sequence
  Synthetic Polynucleotide
ugauaauaggcuggagccucgguggccaugcuucuugccccuugggccuccccccagccccuccuccccuuccugcacccguacccccguggucuuugaauaaagucugagugggcggc

SEQ ID NO: 14 - RNA, 4026 nt, Artificial Sequence
  Synthetic Polynucleotide
gggaaauaagagagaaaagaagaguaagaagaaauauaagagccaccauggaccuggaggccgccaagaacggaaccgccuggagaccuacuagcgccgagggggacuucgaacuggguaucagcucuaagcagaaaagaaagaagacgaagaccgugaagaugaucggcgugcugacccucuuucgguauuccgauuggcaggacaaacuguucaugucacucggcaccaucauggccauugcacacgguagcggucugccccugaugaugaucguguucggcgaaaugaccgauaaauucguggacaccgccgguaacuucuccuucccagucaacuucucacugucccugcugaaccccgggaaaauucuggaggaggagaugaccagauacgcuuacuacuacagcggucugggcgccggcgugcugguggcagccuacauccaggucagcuucuggacccuugccgccggccggcagaucagaaaaaucagacagaaguucuuucaugccauccuuaggcaggagaucggaugguucgacaucaaugauaccaccgaacucaacacccgccugaccgacgauaucuccaagauuuccgagggcaucggugacaaggugggcauguucuuucaggccguggcgaccuucuucgccggcuucauuguggguuucaucagaggcuggaagcugacucuggucauaauggccauuucaccuauccugggccuuagcgccgccgugugggccaagauccuguccgccuuuuccgauaaggagcucgccgccuaugcuaaggccggcgccguggccgaggaggcccugggagccaucaggaccgugauagccuucggcggacagaacaaggaacucgaaagauaucagaaacaccucgagaaugccaaggagaucggcaucaagaaagcuaucagcgccaacauuuccauggguauagccuuccuguugaucuacgcuuccuaugcccucgccuuuugguacggaagcacgcuggugauuagcaaggaguacacgaucggcaacgccaugaccguguucuuuagcauccugaucggugccuucagcgugggacaggccgcaccaugcaucgacgccuucgccaacgcccggggcgcagcauacgugaucuucgacauaaucgacaauaaucccaagaucgacagcuucagcgaaaggggccacaagcccgacuccaucaagggcaacuuggaauucaacgauguucacuuuagcuaccccaguagagcgaaugugaagauccugaaaggccucaaccugaaggugcaaaguggccagacuguugcacuggucggcagcagcggcugcgggaagagcaccacuguccagcugauucagagguuguaugaccccgacgaggggaccaucaacaucgacggccaagacauucggaauuucaacgucaauuaccucagagagaucauugggguggugagccaggagccugugcuguucucaaccacuaucgccgaaaacaucugcuacggccggggcaaugucaccauggaugagaucaaaaaagccguaaaggaggccaacgccuaugaguuuaucaugaagcugccacaaaaauucgacacacuggugggcgaaaggggcgcccaguuaagcgggggccagaagcagcgcaucgccaucgcaagagcccuggugagaaaucccaagauccugcucuuagaugaggcaacaucugcccuggacaccgaguccgaggccgaagugcaggccgcucuggacaaggccagggaggggagaacgacaaucgucaucgcccacagacuguccaccgugaggaaugccgauguuauugccggcuucgaggacggcgugaucguggagcagggcucccacucugaacugaugaagaaagaggggguuuacuucaagcuggugaacaugcagaccagcggcagccagauucagagcgaggaguucgagcucaaugacgagaaggccgccacccgcauggcacccaacggcuggaagagccgccuguucagacacuccacucagaaaaaccugaagaauagccaaaugugccagaaaagccuggacguugagacugacggccuggaggcuaaugugccucccgugagcuuucucaagguacugaaacucaacaaaaccgaguggccuuauuucguggugggcacugugugcgccauugccaacggaggccugcagcccgccuucuccgucaucuucagcgaaaucauugcuaucuucggccccggggacgaugcugugaagcagcagaaguguaacauuuuuagccucauuuucuuguuucuaggcaucauuagcuucuucaccuucuucuugcagggauucaccuucggaaaagcuggggagauucuuacaaggcgccugcggagcauggcuuucaaggccaugcuucgccaggauaugucgugguuugacgaccauaagaauagcaccggcgcccucaguacccgacuggcgaccgacgcugcucaagugcagggagccacagggaccagacuggcucugaucgcccagaacauagcaaaccugggaaccggaauuaucaucucuuucaucuacggcuggcagcucacacugcugcugcuggccguggugccgauuauugccgugagcggaauuguggagaugaaacuucuggcugguaacgcgaagagagauaaaaaggagcuggaggccgccggcaaaaucgccacggaggccaucgagaauauccggacaguggugucucugacccaggagagaaaauucgaaaguauguacguggagaaacuguacggacccuaccggaauuccguacagaaggcccauaucuacggcaucaccuucagcaucagccaggccuucauguacuucuccuacgccggaugcuuccgauuuggggccuaccugauugugaacggacacaugcgguuuagagauguaaucuugguguuuucugcuaucguguucggggccguggcccuggggcacgccuccagcuuugccccugauuacgcuaaggccaaacugagcgcggcucaccuguucaugcuguucgaaagacagccccugaucgauucauacagcgaggagggccucaagccggacaaauucgagggaaacaucaccuuuaacgaggugguguucaauuauccgacccgugcaaacgugcccgucuuacagggccugagccuggaggucaagaagggucagacccuggcccucgugggcuccagcgguugcggcaaauccaccgugguucagcugcuggagagauucuacgacccgcuggcaggcacagugcugcucgacggccaggaagcgaaaaaacugaacgugcaguggcugagagcucaguugggcaucgucagccaggagccgauccucuuugauugcuccaucgcggaaaacauugccuauggcgauaacucccguguggugucucaggacgagaucguaagcgccgccaaggccgccaacauacaccccuucaucgaaacucucccacacaaguaugagacacgagucggagacaaggggacccaacugagcggggggcaaaagcagagaaucgccaucgcccgggcacugaucaggcagccccagauccugcugcuggacgaagccaccucugcccucgacaccgaaucugagaaagucgugcaggaagcccuggacaaggcuagagagggcagaaccuguaucguaaucgcccacagacucagcaccauccagaacgcugaccugauuguggucuuccagaacggcagggucaaggagcacggaacccaccagcaacugcucgcucaaaagggaauauacuucucuauggugucagugcaggcugggacgcagaaccugugauaauaggcuggagccucgguggccaugcuucuugccccuugggccuccccccagccccuccuccccuuccugcacccguacccccuccauaaaguaggaaacacuacaguggucuuugaauaaagucugagugggcggc

SEQ ID NO: 15 - RNA, 3837 nt, Artificial Sequence
  Synthetic Polynucleotide
auggaccuggaggccgccaagaacggaaccgccuggagaccuacuagcgccgagggggacuucgaacuggguaucagcucuaagcagaaaagaaagaagacgaagaccgugaagaugaucggcgugcugacccucuuucgguauuccgauuggcaggacaaacuguucaugucacucggcaccaucauggccauugcacacgguagcggucugccccugaugaugaucguguucggcgaaaugaccgauaaauucguggacaccgccgguaacuucuccuucccagucaacuucucacugucccugcugaaccccgggaaaauucuggaggaggagaugaccagauacgcuuacuacuacagcggucugggcgccggcgugcugguggcagccuacauccaggucagcuucuggacccuugccgccggccggcagaucagaaaaaucagacagaaguucuuucaugccauccuuaggcaggagaucggaugguucgacaucaaugauaccaccgaacucaacacccgccugaccgacgauaucuccaagauuuccgagggcaucggugacaaggugggcauguucuuucaggccguggcgaccuucuucgccggcuucauuguggguuucaucagaggcuggaagcugacucuggucauaauggccauuucaccuauccugggccuuagcgccgccgugugggccaagauccuguccgccuuuuccgauaaggagcucgccgccuaugcuaaggccggcgccguggccgaggaggcccugggagccaucaggaccgugauagccuucggcggacagaacaaggaacucgaaagauaucagaaacaccucgagaaugccaaggagaucggcaucaagaaagcuaucagcgccaacauuuccauggguauagccuuccuguugaucuacgcuuccuaugcccucgccuuuugguacggaagcacgcuggugauuagcaaggaguacacgaucggcaacgccaugaccguguucuuuagcauccugaucggugccuucagcgugggacaggccgcaccaugcaucgacgccuucgccaacgcccggggcgcagcauacgugaucuucgacauaaucgacaauaaucccaagaucgacagcuucagcgaaaggggccacaagcccgacuccaucaagggcaacuuggaauucaacgauguucacuuuagcuaccccaguagagcgaaugugaagauccugaaaggccucaaccugaaggugcaaaguggccagacuguugcacuggucggcagcagcggcugcgggaagagcaccacuguccagcugauucagagguuguaugaccccgacgaggggaccaucaacaucgacggccaagacauucggaauuucaacgucaauuaccucagagagaucauugggguggugagccaggagccugugcuguucucaaccacuaucgccgaaaacaucugcuacggccggggcaaugucaccauggaugagaucaaaaaagccguaaaggaggccaacgccuaugaguuuaucaugaagcugccacaaaaauucgacacacuggugggcgaaaggggcgcccaguuaagcgggggccagaagcagcgcaucgccaucgcaagagcccuggugagaaaucccaagauccugcucuuagaugaggcaacaucugcccuggacaccgaguccgaggccgaagugcaggccgcucuggacaaggccagggaggggagaacgacaaucgucaucgcccacagacuguccaccgugaggaaugccgauguuauugccggcuucgaggacggcgugaucguggagcagggcucccacucugaacugaugaagaaagaggggguuuacuucaagcuggugaacaugcagaccagcggcagccagauucagagcgaggaguucgagcucaaugacgagaaggccgccacccgcauggcacccaacggcuggaagagccgccuguucagacacuccacucagaaaaaccugaagaauagccaaaugugccagaaaagccuggacguugagacugacggccuggaggcuaaugugccucccgugagcuuucucaagguacugaaacucaacaaaaccgaguggccuuauuucguggugggcacugugugcgccauugccaacggaggccugcagcccgccuucuccgucaucuucagcgaaaucauugcuaucuucggccccggggacgaugcugugaagcagcagaaguguaacauuuuuagccucauuuucuuguuucuaggcaucauuagcuucuucaccuucuucuugcagggauucaccuucggaaaagcuggggagauucuuacaaggcgccugcggagcauggcuuucaaggccaugcuucgccaggauaugucgugguuugacgaccauaagaauagcaccggcgcccucaguacccgacuggcgaccgacgcugcucaagugcagggagccacagggaccagacuggcucugaucgcccagaacauagcaaaccugggaaccggaauuaucaucucuuucaucuacggcuggcagcucacacugcugcugcuggccguggugccgauuauugccgugagcggaauuguggagaugaaacuucuggcugguaacgcgaagagagauaaaaaggagcuggaggccgccggcaaaaucgccacggaggccaucgagaauauccggacaguggugucucugacccaggagagaaaauucgaaaguauguacguggagaaacuguacggacccuaccggaauuccguacagaaggcccauaucuacggcaucaccuucagcaucagccaggccuucauguacuucuccuacgccggaugcuuccgauuuggggccuaccugauugugaacggacacaugcgguuuagagauguaaucuugguguuuucugcuaucguguucggggccguggcccuggggcacgccuccagcuuugccccugauuacgcuaaggccaaacugagcgcggcucaccuguucaugcuguucgaaagacagccccugaucgauucauacagcgaggagggccucaagccggacaaauucgagggaaacaucaccuuuaacgaggugguguucaauuauccgacccgugcaaacgugcccgucuuacagggccugagccuggaggucaagaagggucagacccuggcccucgugggcuccagcgguugcggcaaauccaccgugguucagcugcuggagagauucuacgacccgcuggcaggcacagugcugcucgacggccaggaagcgaaaaaacugaacgugcaguggcugagagcucaguugggcaucgucagccaggagccgauccucuuugauugcuccaucgcggaaaacauugccuauggcgauaacucccguguggugucucaggacgagaucguaagcgccgccaaggccgccaacauacaccccuucaucgaaacucucccacacaaguaugagacacgagucggagacaaggggacccaacugagcggggggcaaaagcagagaaucgccaucgcccgggcacugaucaggcagccccagauccugcugcuggacgaagccaccucugcccucgacaccgaaucugagaaagucgugcaggaagcccuggacaaggcuagagagggcagaaccuguaucguaaucgcccacagacucagcaccauccagaacgcugaccugauuguggucuuccagaacggcagggucaaggagcacggaacccaccagcaacugcucgcucaaaagggaauauacuucucuauggugucagugcaggcugggacgcagaaccug

SEQ ID NO: 16 - protein, 1279 aa, Artificial Sequence; identical to SEQ ID NO: 3
  Synthetic Polypeptide

SEQ ID NO: 17 - RNA, 4003 nt, Artificial Sequence
  Synthetic Polynucleotide
gggaaauaagagagaaaagaagaguaagaagaaauauaagagccaccauggaccuggaggccgcaaaaaacggcacugcguggcggcccacaucugccgagggcgacuuugaguuagggaucuccagcaagcagaagagaaaaaagacaaagaccgugaagaugaucggcgugcucacucucuucagauacagcgacuggcaggauaagcucuucaugucccugggcacuaucauggccauugcccacggcagcggacucccacucaugaugaucguguuuggagagaugaccgacaaguucguggacaccgcagggaacuucucuuucccugucaauuucagccucagccugcugaauccuggcaaaauacuggaggaagaaaugaccagauacgccuauuacuacuccggccucggggcaggugugcugguggccgcauauauccaggucagcuucuggacccuggccgccggcagacagaucagaaagaucagacagaaguucuuccacgccauucugagacaggagauuggcugguucgacaucaacgacacaaccgagcuaaacacccgccugacagaugauauuagcaagaucucagagggaaucggcgacaaggugggaauguucuuccaggccguggccaccuucuucgcuggcuuuaucgugggcuucauccggggcuggaaauuaacacuggugaucauggccaucagccccauacuaggccucucggcugcggucugggcaaaaauacuuagcgcuuucucagacaaggagcuggccgccuaugccaaggccggcgccguggccgaagaggcccugggggccauccgcacagugaucgcuuucggaggccagaauaaggagcuugagagguaccagaagcaccuggagaacgccaaagagauaggcaucaaaaaggccaucagcgccaacaucagcauggggaucgcuuuucuguugauauaugccuccuaugcgcuggccuucugguacggcagcacucuggugaucucuaaggaguacaccauuggcaaugccaugaccguuuucuuuagcauccugaucggcgccuucagcgugggucaggcggcuccguguauugaugccuucgccaaugcuagaggcgcugccuacgucauuuuugacauuaucgacaacaaccccaagaucgacagcuucucagagcgcggccacaagccugacagcaucaagggcaaccucgaguucaaugacgugcauuucagcuaucccagcagagccaaugucaagauccugaagggguugaaccugaaggugcaaagcggucaaaccguggcccuggugggcagcagcggcugcggcaaaucaaccaccgugcaacugauccaaaggcuguacgacccggacgagggcaccaucaauauagacggccaggacauccgaaacuucaacgugaacuaucugagagagauuaucggcguggugagccaggaacccgugcuguucucuaccaccauugccgaaaacaucugcuacggacggggcaacgugacaauggaugagaucaagaaagcagugaaagaagccaaugccuaugaguucauuaugaaacugccccagaaguucgauacccuggugggugaaagaggagcccagcuguccggagggcaaaagcagaggaucgccauugccagggcccucgugaggaaccccaagauucugcucuuggacgaagcuacauccgcacucgacacagagagcgaggcugaggugcaggcugcccucgacaaggcacgggagggcaggacaaccaucgugauugcucauaggcuguccaccguuagaaacgcugacgugauugcuggcuuugaggacggcgugaucguggagcagggcagucacuccgagcugaugaagaaggaaggaguguacuucaaacugguaaacaugcagaccaguggcagccagauccaguccgaggaguuugagcugaaugacgagaaggccgcgacaagaauggccccuaacggguggaaguccaggcuguucaggcacagcacacagaagaaccugaagaacucucagaugugccagaaaucccuggacguggagacagacggacuggaggcuaacgugccccccgucuccuuucugaaggugcugaaguuaaauaagaccgaguggccauacuucgucguaggcaccgucugcgccaucgccaacggaggcuuacaacccgccuucuccgucaucuucagcgagaucauagccauauucgggcccggcgacgaugccgucaagcaacagaagugcaacauuuucagcuuaaucuuucuguuccugggaaucaucagcuucuucacauucuuccugcaggguuucaccuucggcaaagccggagagauccugacuagaagacugaggucaauggccuucaaagccauguugcggcaggacauguccugguucgacgaucacaagaacuccacaggagcucugagcacuaggcuugcgacagacgcugcccagguccagggagcuaccggcacaaggcuggcacucaucgcccagaauaucgccaaccugggcaccggcaucauuaucagcuuuaucuacggcuggcagcugacccugcugcugcuggccguggugccuaucaucgccgugagcggcaucguggaaaugaagcugcuggcuggcaaugccaagagagauaaaaaggaauuggaggccgcaggcaagaucgccaccgaggccauugagaauauccgcaccguggucucacugacccaggaacgcaaguucgagucaauguacgucgagaagcucuacggccccuauagaaacagcgugcagaaggcccauauuuacggcaucaccuuuaguaucagccaggccuuuauguacuuuagcuacgccggcugcuuucgauucggagcauaucugaucgugaacggccacaugagguuccgcgacguuaucuugguguuuucugcuaucgucuucggcgcgguggcccugggucacgcuaguuccuucgcucccgacuacgccaaggcaaagcugagcgcagcgcaucuguucaugcuguucgagagacaaccccugaucgacucauacuccgaggagggccugaagccagauaaguuugagggcaacauuaccuucaacgaggugguguuuaacuaucccacacgagcaaacgucccagugcuccagggccugagccuggaagugaaaaagggccagacccucgcccuugucggcagcagcggcugcgguaagagcacaguggugcagcuucuggagagauucuaugacccccuggccgguaccguccugcuggacggccaggaggcaaagaaauugaacgugcaguggcugagagcucagcucggcauugugucccaggagcccauccuguucgacuguucgaucgccgaaaauaucgcauacggggacaauaguagaguuguuagccaggacgagauuguguccgcugccaaggcugccaacauacauccuuucaucgaaacccuaccucacaaguacgaaacccguguuggcgacaaggguacucagcugucaggaggccagaaacagagaauugccaucgcgagagcccugauuagacagccacagauccugcugcucgacgaggcaaccagcgccuuggauacugagucggagaagguggugcaggaggcccuggacaaggcacgggaaggcagaaccugcaucgugauugcucaccggcucuccacuauccagaacgccgacuuaauugugguguuccagaauggccgcguaaaagagcacggaacacaccaacagcuguuggcccagaagggcaucuacuucagcauggucagcgugcaggccggcacccagaaccugugauaauaggcuggagccucgguggccaugcuucuugccccuugggccuccccccagccccuccuccccuuccugcacccguacccccguggucuuugaauaaagucugagugggcggc

SEQ ID NO: 18 - RNA, 3837 nt, Artificial Sequence
  Synthetic Polynucleotide
auggaccuggaggccgcaaaaaacggcacugcguggcggcccacaucugccgagggcgacuuugaguuagggaucuccagcaagcagaagagaaaaaagacaaagaccgugaagaugaucggcgugcucacucucuucagauacagcgacuggcaggauaagcucuucaugucccugggcacuaucauggccauugcccacggcagcggacucccacucaugaugaucguguuuggagagaugaccgacaaguucguggacaccgcagggaacuucucuuucccugucaauuucagccucagccugcugaauccuggcaaaauacuggaggaagaaaugaccagauacgccuauuacuacuccggccucggggcaggugugcugguggccgcauauauccaggucagcuucuggacccuggccgccggcagacagaucagaaagaucagacagaaguucuuccacgccauucugagacaggagauuggcugguucgacaucaacgacacaaccgagcuaaacacccgccugacagaugauauuagcaagaucucagagggaaucggcgacaaggugggaauguucuuccaggccguggccaccuucuucgcuggcuuuaucgugggcuucauccggggcuggaaauuaacacuggugaucauggccaucagccccauacuaggccucucggcugcggucugggcaaaaauacuuagcgcuuucucagacaaggagcuggccgccuaugccaaggccggcgccguggccgaagaggcccugggggccauccgcacagugaucgcuuucggaggccagaauaaggagcuugagagguaccagaagcaccuggagaacgccaaagagauaggcaucaaaaaggccaucagcgccaacaucagcauggggaucgcuuuucuguugauauaugccuccuaugcgcuggccuucugguacggcagcacucuggugaucucuaaggaguacaccauuggcaaugccaugaccguuuucuuuagcauccugaucggcgccuucagcgugggucaggcggcuccguguauugaugccuucgccaaugcuagaggcgcugccuacgucauuuuugacauuaucgacaacaaccccaagaucgacagcuucucagagcgcggccacaagccugacagcaucaagggcaaccucgaguucaaugacgugcauuucagcuaucccagcagagccaaugucaagauccugaagggguugaaccugaaggugcaaagcggucaaaccguggcccuggugggcagcagcggcugcggcaaaucaaccaccgugcaacugauccaaaggcuguacgacccggacgagggcaccaucaauauagacggccaggacauccgaaacuucaacgugaacuaucugagagagauuaucggcguggugagccaggaacccgugcuguucucuaccaccauugccgaaaacaucugcuacggacggggcaacgugacaauggaugagaucaagaaagcagugaaagaagccaaugccuaugaguucauuaugaaacugccccagaaguucgauacccuggugggugaaagaggagcccagcuguccggagggcaaaagcagaggaucgccauugccagggcccucgugaggaaccccaagauucugcucuuggacgaagcuacauccgcacucgacacagagagcgaggcugaggugcaggcugcccucgacaaggcacgggagggcaggacaaccaucgugauugcucauaggcuguccaccguuagaaacgcugacgugauugcuggcuuugaggacggcgugaucguggagcagggcagucacuccgagcugaugaagaaggaaggaguguacuucaaacugguaaacaugcagaccaguggcagccagauccaguccgaggaguuugagcugaaugacgagaaggccgcgacaagaauggccccuaacggguggaaguccaggcuguucaggcacagcacacagaagaaccugaagaacucucagaugugccagaaaucccuggacguggagacagacggacuggaggcuaacgugccccccgucuccuuucugaaggugcugaaguuaaauaagaccgaguggccauacuucgucguaggcaccgucugcgccaucgccaacggaggcuuacaacccgccuucuccgucaucuucagcgagaucauagccauauucgggcccggcgacgaugccgucaagcaacagaagugcaacauuuucagcuuaaucuuucuguuccugggaaucaucagcuucuucacauucuuccugcaggguuucaccuucggcaaagccggagagauccugacuagaagacugaggucaauggccuucaaagccauguugcggcaggacauguccugguucgacgaucacaagaacuccacaggagcucugagcacuaggcuugcgacagacgcugcccagguccagggagcuaccggcacaaggcuggcacucaucgcccagaauaucgccaaccugggcaccggcaucauuaucagcuuuaucuacggcuggcagcugacccugcugcugcuggccguggugccuaucaucgccgugagcggcaucguggaaaugaagcugcuggcuggcaaugccaagagagauaaaaaggaauuggaggccgcaggcaagaucgccaccgaggccauugagaauauccgcaccguggucucacugacccaggaacgcaaguucgagucaauguacgucgagaagcucuacggccccuauagaaacagcgugcagaaggcccauauuuacggcaucaccuuuaguaucagccaggccuuuauguacuuuagcuacgccggcugcuuucgauucggagcauaucugaucgugaacggccacaugagguuccgcgacguuaucuugguguuuucugcuaucgucuucggcgcgguggcccugggucacgcuaguuccuucgcucccgacuacgccaaggcaaagcugagcgcagcgcaucuguucaugcuguucgagagacaaccccugaucgacucauacuccgaggagggccugaagccagauaaguuugagggcaacauuaccuucaacgaggugguguuuaacuaucccacacgagcaaacgucccagugcuccagggccugagccuggaagugaaaaagggccagacccucgcccuugucggcagcagcggcugcgguaagagcacaguggugcagcuucuggagagauucuaugacccccuggccgguaccguccugcuggacggccaggaggcaaagaaauugaacgugcaguggcugagagcucagcucggcauugugucccaggagcccauccuguucgacuguucgaucgccgaaaauaucgcauacggggacaauaguagaguuguuagccaggacgagauuguguccgcugccaaggcugccaacauacauccuuucaucgaaacccuaccucacaaguacgaaacccguguuggcgacaaggguacucagcugucaggaggccagaaacagagaauugccaucgcgagagcccugauuagacagccacagauccugcugcucgacgaggcaaccagcgccuuggauacugagucggagaagguggugcaggaggcccuggacaaggcacgggaaggcagaaccugcaucgugauugcucaccggcucuccacuauccagaacgccgacuuaauugugguguuccagaauggccgcguaaaagagcacggaacacaccaacagcuguuggcccagaagggcaucuacuucagcauggucagcgugcaggccggcacccagaaccug

SEQ ID NO: 19 - protein, 1279 aa, Artificial Sequence; identical to SEQ ID NO: 3
  Synthetic Polypeptide

SEQ ID NO: 20 - RNA, 4003 nt, Artificial Sequence
  Synthetic Polynucleotide
gggaaauaagagagaaaagaagaguaagaagaaauauaagagccaccauggaucuggaggccgcaaagaacggaaccgccuggaggcccaccagcgccgagggagacuucgagcugggcaucagcucuaaacagaagagaaagaagaccaagaccgucaaaaugaucggcgugcuaacacuuuuccgcuauuccgacuggcaggacaagcuuuuuaugucucugggcacaaucauggccauagcucauggaagcggccugccucucaugaugauuguuuucggcgagaugacugauaaguucguggacaccgccggaaacuucagcuuucccgucaacuucagccucucacugcugaaccccgggaaaauucuugaagaggagaugacccgcuaugcauacuauuauagcggccugggagccggggugcuuguggccgcuuacauccagguguccuucuggacccuggccgcuggaaggcaaauucggaagaucagacagaaguuuuuccaugccauccuucggcaggagaucgggugguucgauauuaacgacaccaccgagcuuaauacccgccugaccgaugacaucagcaagaucucagaggggaucggagacaaagugggcauguuuuuccaggccgucgccaccuuuuuugccgguuucauugugggcuucauuaggggcuggaagcugacccuggugauuauggcuauuagccccauccuuggccugagcgccgccgugugggcuaaaauccuguccgcuuuuucugauaaggagcucgccgccuacgccaaggccggcgcggucgcugaggaggcccucggggcuauuaggaccgucauugccuucggcggccagaacaaggagcuggagagauaccagaagcaucuggagaaugcgaaagagaucggcauuaaaaaagccaucuccgccaacaucagcaugggaaucgccuuccugcugauuuacgccucauacgcccuggccuucugguacggcagcacucuggugaucagcaaggaguauaccauuggcaaugcuaugacugucuuuuucucuauccucauuggcgcuuucagcgucggacaggcugcccccuguaucgacgccuucgccaacgcuagaggcgcugccuaugugauuuucgacaucaucgacaauaaccccaagaucgauagcuucagcgagaggggacacaagcccgacucaaucaaagguaacuuggaguucaacgaugugcacuucagcuaccccagcagggccaacgugaagauacugaagggccugaaccugaaggugcagagcggucagaccguggccuuggugggcagcuccggcugcggcaagagcacuacugugcagcugauccagagauuguacgauccagacgagggaaccaucaauaucgacgggcaggacaucagaaauuucaaugugaacuauuugcgcgaaaucaucggugucgugucucaggagccuguucuguuuaguacuacuaucgccgagaauaucuguuacgguagaggcaacguuacuauggaugagaucaaaaaagccgugaaggaggcuaacgcuuaugaguucaucaugaagcucccccagaaguuugacacucuggugggcgaacggggcgcccagcuguccggaggacagaagcagaggauugccaucgcccgagcccuggugagaaauccuaaaauccugcuccuggacgaagcaaccucugcccuggauaccgagucugaggcagaaguccaggccgcccuggacaaggcuagggaggggagaacuacaauugugaucgcacacagacucuccacugugagaaacgccgacgugaucgcugguuucgaggauggcgugaucgucgaacaggggucucacagcgagcugaugaaaaaagaagguguguauuucaagcugguuaacaugcagaccuccggaagccagauccagagcgaagaguucgaacugaaugacgagaaggccgccacaagaauggcccccaacggcuggaaaucaagacuuuuuaggcacagcacucaaaaaaaucugaaaaacucucagaugugccagaaaagccuugacgucgagaccgacggccuugaggcaaacgugccccccgucuccuuccucaagguccugaaacugaacaaaaccgaauggcccuacuucguagugggaaccgugugugcuaucgccaacggcggacuccagcccgccuucagcgugauauucagcgaaaucaucgcuaucuucggaccgggagaugacgcugugaagcagcagaaaugcaacaucuucucacucaucuuccuguuccuggguaucaucucuuucuuuacuuucuuucugcagggcuucaccuucggcaaggccggggagauccugacccgaaggcugagaucaauggccuuuaaggccaugcucagacaggauaugagcugguucgaugaucacaagaacucgacaggcgcucugagcacgcggcuggccacugacgcagcccaaguacagggagccacagggacacgacuggcucugaucgcccagaacauugccaaucugggcacugggauuaucaucaguuuuaucuacggcuggcagcugacacugcuccuccuggcaguggugcccaucaucgcuguuaguggaauugucgagaugaaacugcuggccggcaacgcuaagagagauaaaaaggagcuggaggccgccggcaagaucgcuaccgaagccauugagaauauacggaccgucgugagccugacccaggagagaaaguucgagagcauguacguggagaagcucuaugggcccuauagaaacagcgugcagaaagcucauaucuauggaaucaccuucucuauuucccaggcguucauguacuucucuuaugccggcugcuucagauucggcgccuaucugaucgugaacggccacaugcguuucagagacguaauccuggucuucucggccauuguguuuggagccguggcauugggccaugccagcagcuucgcaccagauuacgccaaggccaagcugagcgcugcccacuuguucaugcuguucgagcggcagccacucaucgacuccuauagcgaggagggacugaaaccagacaaguucgagggcaacaucaccuuuaacgaggugguauucaauuaccccacaagagcaaacgugcccgugcugcagggccugagccuggaggugaaaaagggccagacccuugcccugguuggcaguaguggcugcggcaagagcaccguugugcagcugcucgaaagauucuacgacccuuuggcggggaccguucugcuugauggacaggaggcuaagaagcucaacgugcaguggcuuagagcucagcugggcauugugagucaggagcccauucuguucgauuguagcauugccgagaauaucgcguauggggauaacagcagagugguuucacaggaugagauuguguccgccgccaaggccgccaacauccaccccuucaucgaaacacugccucacaaguacgagacccgugugggcgauaagggcacccagcugagcggcgggcagaagcagagaauugcuaucgcuagagcucugauucgucagccgcagauccugcugcuggacgaagccacgucagcccuggacaccgagagcgagaaggugguccaggaggcucuggauaaggccagagagggcaggacauguaucgucaucgcacacagauugagcaccauccagaacgccgaccugaucguugucuuucagaacggccgagucaaggagcauggaacucaccagcagcuccuggcccagaagggcaucuacuucagcauggucagcgugcaggcaggcacccagaaucucugauaauaggcuggagccucgguggccaugcuucuugccccuugggccuccccccagccccuccuccccuuccugcacccguacccccguggucuuugaauaaagucugagugggcggc

SEQ ID NO: 21 - RNA, 3837 nt, Artificial Sequence
  Synthetic Polynucleotide
auggaucuggaggccgcaaagaacggaaccgccuggaggcccaccagcgccgagggagacuucgagcugggcaucagcucuaaacagaagagaaagaagaccaagaccgucaaaaugaucggcgugcuaacacuuuuccgcuauuccgacuggcaggacaagcuuuuuaugucucugggcacaaucauggccauagcucauggaagcggccugccucucaugaugauuguuuucggcgagaugacugauaaguucguggacaccgccggaaacuucagcuuucccgucaacuucagccucucacugcugaaccccgggaaaauucuugaagaggagaugacccgcuaugcauacuauuauagcggccugggagccggggugcuuguggccgcuuacauccagguguccuucuggacccuggccgcuggaaggcaaauucggaagaucagacagaaguuuuuccaugccauccuucggcaggagaucgggugguucgauauuaacgacaccaccgagcuuaauacccgccugaccgaugacaucagcaagaucucagaggggaucggagacaaagugggcauguuuuuccaggccgucgccaccuuuuuugccgguuucauugugggcuucauuaggggcuggaagcugacccuggugauuauggcuauuagccccauccuuggccugagcgccgccgugugggcuaaaauccuguccgcuuuuucugauaaggagcucgccgccuacgccaaggccggcgcggucgcugaggaggcccucggggcuauuaggaccgucauugccuucggcggccagaacaaggagcuggagagauaccagaagcaucuggagaaugcgaaagagaucggcauuaaaaaagccaucuccgccaacaucagcaugggaaucgccuuccugcugauuuacgccucauacgcccuggccuucugguacggcagcacucuggugaucagcaaggaguauaccauuggcaaugcuaugacugucuuuuucucuauccucauuggcgcuuucagcgucggacaggcugcccccuguaucgacgccuucgccaacgcuagaggcgcugccuaugugauuuucgacaucaucgacaauaaccccaagaucgauagcuucagcgagaggggacacaagcccgacucaaucaaagguaacuuggaguucaacgaugugcacuucagcuaccccagcagggccaacgugaagauacugaagggccugaaccugaaggugcagagcggucagaccguggccuuggugggcagcuccggcugcggcaagagcacuacugugcagcugauccagagauuguacgauccagacgagggaaccaucaauaucgacgggcaggacaucagaaauuucaaugugaacuauuugcgcgaaaucaucggugucgugucucaggagccuguucuguuuaguacuacuaucgccgagaauaucuguuacgguagaggcaacguuacuauggaugagaucaaaaaagccgugaaggaggcuaacgcuuaugaguucaucaugaagcucccccagaaguuugacacucuggugggcgaacggggcgcccagcuguccggaggacagaagcagaggauugccaucgcccgagcccuggugagaaauccuaaaauccugcuccuggacgaagcaaccucugcccuggauaccgagucugaggcagaaguccaggccgcccuggacaaggcuagggaggggagaacuacaauugugaucgcacacagacucuccacugugagaaacgccgacgugaucgcugguuucgaggauggcgugaucgucgaacaggggucucacagcgagcugaugaaaaaagaagguguguauuucaagcugguuaacaugcagaccuccggaagccagauccagagcgaagaguucgaacugaaugacgagaaggccgccacaagaauggcccccaacggcuggaaaucaagacuuuuuaggcacagcacucaaaaaaaucugaaaaacucucagaugugccagaaaagccuugacgucgagaccgacggccuugaggcaaacgugccccccgucuccuuccucaagguccugaaacugaacaaaaccgaauggcccuacuucguagugggaaccgugugugcuaucgccaacggcggacuccagcccgccuucagcgugauauucagcgaaaucaucgcuaucuucggaccgggagaugacgcugugaagcagcagaaaugcaacaucuucucacucaucuuccuguuccuggguaucaucucuuucuuuacuuucuuucugcagggcuucaccuucggcaaggccggggagauccugacccgaaggcugagaucaauggccuuuaaggccaugcucagacaggauaugagcugguucgaugaucacaagaacucgacaggcgcucugagcacgcggcuggccacugacgcagcccaaguacagggagccacagggacacgacuggcucugaucgcccagaacauugccaaucugggcacugggauuaucaucaguuuuaucuacggcuggcagcugacacugcuccuccuggcaguggugcccaucaucgcuguuaguggaauugucgagaugaaacugcuggccggcaacgcuaagagagauaaaaaggagcuggaggccgccggcaagaucgcuaccgaagccauugagaauauacggaccgucgugagccugacccaggagagaaaguucgagagcauguacguggagaagcucuaugggcccuauagaaacagcgugcagaaagcucauaucuauggaaucaccuucucuauuucccaggcguucauguacuucucuuaugccggcugcuucagauucggcgccuaucugaucgugaacggccacaugcguuucagagacguaauccuggucuucucggccauuguguuuggagccguggcauugggccaugccagcagcuucgcaccagauuacgccaaggccaagcugagcgcugcccacuuguucaugcuguucgagcggcagccacucaucgacuccuauagcgaggagggacugaaaccagacaaguucgagggcaacaucaccuuuaacgaggugguauucaauuaccccacaagagcaaacgugcccgugcugcagggccugagccuggaggugaaaaagggccagacccuugcccugguuggcaguaguggcugcggcaagagcaccguugugcagcugcucgaaagauucuacgacccuuuggcggggaccguucugcuugauggacaggaggcuaagaagcucaacgugcaguggcuuagagcucagcugggcauugugagucaggagcccauucuguucgauuguagcauugccgagaauaucgcguauggggauaacagcagagugguuucacaggaugagauuguguccgccgccaaggccgccaacauccaccccuucaucgaaacacugccucacaaguacgagacccgugugggcgauaagggcacccagcugagcggcgggcagaagcagagaauugcuaucgcuagagcucugauucgucagccgcagauccugcugcuggacgaagccacgucagcccuggacaccgagagcgagaaggugguccaggaggcucuggauaaggccagagagggcaggacauguaucgucaucgcacacagauugagcaccauccagaacgccgaccugaucguugucuuucagaacggccgagucaaggagcauggaacucaccagcagcuccuggcccagaagggcaucuacuucagcauggucagcgugcaggcaggcacccagaaucuc

SEQ ID NO: 22 - protein, 1279 aa, Artificial Sequence; identical to SEQ ID NO: 3
  Synthetic Polypeptide

SEQ ID NO: 23 - RNA, 4003 nt, Artificial Sequence
  Synthetic Polynucleotide
gggaaauaagagagaaaagaagaguaagaagaaauauaagagccaccauggaccucgaggccgccaagaacggcaccgccuggaggcccacaagcgcugaaggggacuucgagcuggggauuaguucuaagcagaagcgcaaaaagacuaaaacugugaagaugauaggcgugcugacacuuuuccgguauagcgauuggcaggacaagcuguuuaugagccugggcaccauuauggcuaucgcccacggcaguggauuacccuugaugaugaucguguuuggcgagaugaccgacaaguucguggacaccgccgggaacuucucuuuuccugugaacuucagccugagccugcugaaccccggcaaaauccuggaggaggagaugaccagguacgccuauuauuacagcggccucggagcuggcgugcugguggccgccuacauccaggucagcuucuggacccuggccgccgggagacaaaucagaaagauccgucagaaguucuuccaugccauucuccggcaggaaauugggugguuugacaucaacgacaccacugagcugaacaccaggcugaccgacgauaucaguaagauuucagagggcaucggcgacaaggugggcauguucuuccaagccguggccacauucuuugccggauucauugugggcuuuauuagagguuggaagcuaacccuggucauuauggccaucagccccauucucgggcuguccgcugccgugugggcgaaaauuuugagugccuuuagcgauaaagaguuggcggccuaugcuaaggccggcgcuguggcagaggaggcccuuggggcuauucggaccgugaucgcauucggcggccaaaacaaggagcuggagagguaccagaagcaucuggagaaugccaaggagaucggcaucaagaaggccauaagcgccaauauaagcaugggcaucgccuuccugcucaucuacgccuccuacgcccuggccuucugguacggcucuacccuggugaucuccaaggaguacaccaucggaaacgccaugaccgucuucuucucaauccugaucggggccuucuccgugggacaggccgcuccaugcaucgaugccuuugcuaacgcaaggggugccgccuacgugaucuucgauaucauugauaacaacccuaagaucgacaguuuuagugagagaggccacaaacccgauuccauuaaaggaaacuuagaguucaacgaugugcauuucucauauccuagccgagccaacgugaaaauccugaagggacugaacuugaaggugcaguccggacagacggucgcuuuagugggaagcagcggcugcggaaagagcacaacagugcagcugauucagagacuguaugacccugacgaggggacgauuaauaucgacggccaggacauuagaaacuucaacgugaauuaucugagggagauaaucggaguggugagucaggagccuguguuguucagcaccaccaucgccgagaacaucugcuacgguagaggaaacguuacuauggaugagaucaaaaaggccgugaaagaagccaacgccuacgaguucaucaugaaacugccucagaaauucgacacucuugugggugaacggggcgcucagcugagcggaggacagaagcagcggaucgcaaucgcuagagcccuugugagaaacccaaagauccugcugcuggaugaggccaccuccgcccuggacacagagucugaagcagaggugcaggccgcccuggacaaggcuagggaggggcggacaacaauugucauugcccacaggcucagcaccguucgcaacgccgacgucauugccggcuucgaagacggcguuauugucgaacaggggucccacuccgagcuuaugaagaaagagggaguuuacuucaaacuggugaacaugcagaccuccggaagccagauccagagcgaggaguucgagcucaacgacgagaaggccgcuaccagaauggccccuaacggauggaagagcagacuguucagacauucuacccagaagaaucucaaaaacagccagaugugccagaagagccuggacgucgagaccgacggccucgaggcaaacgugccuccugucuccuuucuuaaggugcugaagcugaacaagacagaauggcccuacuucguggugggaacagucugugccaucgcuaacggcggccugcagccugcguucagcgugaucuucuccgagaucauugccaucuucggaccuggcgacgacgccgugaagcaacagaaaugcaauauuuucagccugaucuuucuguuccugggaaucaucagcuucuucacauuuuuccuccagggcuuuacauucggcaaggcgggagagauccugacaaggagacuuagaagcauggcauuuaaggccaugcugaggcaggacaugagcugguuugacgaccauaagaacuccaccggcgcacugagcacccgacuggccaccgacgcugcccaggugcagggugccaccgggacaagauuggcccugaucgcccagaauaucgccaaccugggcacagggauuauuaucuccuucauuuacggauggcagcugacccugcuccugcucgcuguuguccccauuaucgccgugucuggaaucguggagaugaaacugcuggccggcaacgccaaacgcgacaagaaagagcuugaggccgcugggaagauagccaccgaggccaucgaaaacaucaggacagugguuucccucacccaggagcggaaauuugaauccauguacguggagaagcuguacggccccuaucgcaauuccgugcaaaaagcccacauauaugggauuacauucucuaucagccaagcguucauguacuucagcuacgccggauguuucagguucggcgcguaccugaucguaaacgggcacaugagguuccgugacgugauccugguguucagcgccaucguguuuggcgccguggcuuuagggcacgcuagcagcuucgccccagauuaugccaaggccaagcuguccgccgcucaccuauuuaugcuguuugaaaggcagccccugauagacagcuauagcgaagaaggucugaagccugacaaauucgaaggcaacaucaccuuuaacgagguuguguucaauuaucccacaagagcaaaugugcccgugcugcagggccugucccuggaggugaagaagggccagacccuggccuuagugggcagcagcggcugcggcaaauccacaguggugcagcugcucgagcgcuucuaugauccucuggccggcacugugcugcuggacgggcaggaggcuaagaaguugaaugugcagugguugcgggcccagcuggggaucgugucacaggaacccauccuguucgacugcagcaucgcggagaacaucgccuauggcgauaauucucguguugugucccaggacgagaucgugagcgccgccaaggccgcuaacauccaucccuucaucgagacacugccucauaaauacgaaaccagagucggcgacaagggcacacagcugagcgggggccagaaacagcgcauugcaauugcccgggcgcugauuagacagccccaaauucugcugcuggacgaggccacguccgcacuggauacagaauccgaaaaagugguucaagaggcuuuggacaaagccagagaagggaggaccugcaucgugaucgcccauaggcugagcacgauucagaaugcagaucuuaucguggucuuccagaacggccgcgucaaggagcacgggacgcaucagcaguuacuggcccagaagggcauuuacuuuagcauggucagcgugcaggcuggcacccaaaaccugugauaauaggcuggagccucgguggccaugcuucuugccccuugggccuccccccagccccuccuccccuuccugcacccguacccccguggucuuugaauaaagucugagugggcggc

SEQ ID NO: 24 - RNA, 3837 nt, Artificial Sequence
  Synthetic Polynucleotide
auggaccucgaggccgccaagaacggcaccgccuggaggcccacaagcgcugaaggggacuucgagcuggggauuaguucuaagcagaagcgcaaaaagacuaaaacugugaagaugauaggcgugcugacacuuuuccgguauagcgauuggcaggacaagcuguuuaugagccugggcaccauuauggcuaucgcccacggcaguggauuacccuugaugaugaucguguuuggcgagaugaccgacaaguucguggacaccgccgggaacuucucuuuuccugugaacuucagccugagccugcugaaccccggcaaaauccuggaggaggagaugaccagguacgccuauuauuacagcggccucggagcuggcgugcugguggccgccuacauccaggucagcuucuggacccuggccgccgggagacaaaucagaaagauccgucagaaguucuuccaugccauucuccggcaggaaauugggugguuugacaucaacgacaccacugagcugaacaccaggcugaccgacgauaucaguaagauuucagagggcaucggcgacaaggugggcauguucuuccaagccguggccacauucuuugccggauucauugugggcuuuauuagagguuggaagcuaacccuggucauuauggccaucagccccauucucgggcuguccgcugccgugugggcgaaaauuuugagugccuuuagcgauaaagaguuggcggccuaugcuaaggccggcgcuguggcagaggaggcccuuggggcuauucggaccgugaucgcauucggcggccaaaacaaggagcuggagagguaccagaagcaucuggagaaugccaaggagaucggcaucaagaaggccauaagcgccaauauaagcaugggcaucgccuuccugcucaucuacgccuccuacgcccuggccuucugguacggcucuacccuggugaucuccaaggaguacaccaucggaaacgccaugaccgucuucuucucaauccugaucggggccuucuccgugggacaggccgcuccaugcaucgaugccuuugcuaacgcaaggggugccgccuacgugaucuucgauaucauugauaacaacccuaagaucgacaguuuuagugagagaggccacaaacccgauuccauuaaaggaaacuuagaguucaacgaugugcauuucucauauccuagccgagccaacgugaaaauccugaagggacugaacuugaaggugcaguccggacagacggucgcuuuagugggaagcagcggcugcggaaagagcacaacagugcagcugauucagagacuguaugacccugacgaggggacgauuaauaucgacggccaggacauuagaaacuucaacgugaauuaucugagggagauaaucggaguggugagucaggagccuguguuguucagcaccaccaucgccgagaacaucugcuacgguagaggaaacguuacuauggaugagaucaaaaaggccgugaaagaagccaacgccuacgaguucaucaugaaacugccucagaaauucgacacucuugugggugaacggggcgcucagcugagcggaggacagaagcagcggaucgcaaucgcuagagcccuugugagaaacccaaagauccugcugcuggaugaggccaccuccgcccuggacacagagucugaagcagaggugcaggccgcccuggacaaggcuagggaggggcggacaacaauugucauugcccacaggcucagcaccguucgcaacgccgacgucauugccggcuucgaagacggcguuauugucgaacaggggucccacuccgagcuuaugaagaaagagggaguuuacuucaaacuggugaacaugcagaccuccggaagccagauccagagcgaggaguucgagcucaacgacgagaaggccgcuaccagaauggccccuaacggauggaagagcagacuguucagacauucuacccagaagaaucucaaaaacagccagaugugccagaagagccuggacgucgagaccgacggccucgaggcaaacgugccuccugucuccuuucuuaaggugcugaagcugaacaagacagaauggcccuacuucguggugggaacagucugugccaucgcuaacggcggccugcagccugcguucagcgugaucuucuccgagaucauugccaucuucggaccuggcgacgacgccgugaagcaacagaaaugcaauauuuucagccugaucuuucuguuccugggaaucaucagcuucuucacauuuuuccuccagggcuuuacauucggcaaggcgggagagauccugacaaggagacuuagaagcauggcauuuaaggccaugcugaggcaggacaugagcugguuugacgaccauaagaacuccaccggcgcacugagcacccgacuggccaccgacgcugcccaggugcagggugccaccgggacaagauuggcccugaucgcccagaauaucgccaaccugggcacagggauuauuaucuccuucauuuacggauggcagcugacccugcuccugcucgcuguuguccccauuaucgccgugucuggaaucguggagaugaaacugcuggccggcaacgccaaacgcgacaagaaagagcuugaggccgcugggaagauagccaccgaggccaucgaaaacaucaggacagugguuucccucacccaggagcggaaauuugaauccauguacguggagaagcuguacggccccuaucgcaauuccgugcaaaaagcccacauauaugggauuacauucucuaucagccaagcguucauguacuucagcuacgccggauguuucagguucggcgcguaccugaucguaaacgggcacaugagguuccgugacgugauccugguguucagcgccaucguguuuggcgccguggcuuuagggcacgcuagcagcuucgccccagauuaugccaaggccaagcuguccgccgcucaccuauuuaugcuguuugaaaggcagccccugauagacagcuauagcgaagaaggucugaagccugacaaauucgaaggcaacaucaccuuuaacgagguuguguucaauuaucccacaagagcaaaugugcccgugcugcagggccugucccuggaggugaagaagggccagacccuggccuuagugggcagcagcggcugcggcaaauccacaguggugcagcugcucgagcgcuucuaugauccucuggccggcacugugcugcuggacgggcaggaggcuaagaaguugaaugugcagugguugcgggcccagcuggggaucgugucacaggaacccauccuguucgacugcagcaucgcggagaacaucgccuauggcgauaauucucguguugugucccaggacgagaucgugagcgccgccaaggccgcuaacauccaucccuucaucgagacacugccucauaaauacgaaaccagagucggcgacaagggcacacagcugagcgggggccagaaacagcgcauugcaauugcccgggcgcugauuagacagccccaaauucugcugcuggacgaggccacguccgcacuggauacagaauccgaaaaagugguucaagaggcuuuggacaaagccagagaagggaggaccugcaucgugaucgcccauaggcugagcacgauucagaaugcagaucuuaucguggucuuccagaacggccgcgucaaggagcacgggacgcaucagcaguuacuggcccagaagggcauuuacuuuagcauggucagcgugcaggcuggcacccaaaaccug

SEQ ID NO: 25 - protein, 1279 aa, Artificial Sequence; identical to SEQ ID NO: 3
  Synthetic Polypeptide

SEQ ID NO: 26 - RNA, 4003 nt, Artificial Sequence
  Synthetic Polynucleotide
gggaaauaagagagaaaagaagaguaagaagaaauauaagagccaccauggaccuugaagcugcaaagaacggcaccgccuggagacccacuuccgcggagggcgauuuugaacugggcaucuccagcaagcagaagaggaaaaagacaaagacaguuaaaaugaucggcgugcugacccuguucagauacagcgauuggcaagacaagcuguucaugagccugggcacaauuauggccaucgcacacggcuccggacugccucugaugaugaucgucuucggcgaaaugaccgacaaguucguagacacugcggggaacuucagcuucccugucaacuucagucucagcuuacugaacccuggcaagauccucgaggaggagaugaccagguacgccuacuauuacagcggacucggcgcgggcgugcugguggccgcauacauccagguguccuucuggacacuggcggcaggaagacagaucaggaaaaucaggcagaaguuuuuucaugcaauccugcgacaggagaucggcugguucgacauaaacgacaccaccgagcugaacaccaggcugacugacgacauuuccaagaucagcgaggggaucggcgacaaggugggcauguucuuccaggccguggccaccuucuucgccggcuucauagugggguuuauccggggcuggaaacugacacucgucaucauggccaucucaccgauccugggccugagcgcugcugugugggcaaagauccucuccgcauucagcgacaaggagcuggccgcuuacgccaaggccggcgccgucgcugaagaggcucugggggccauccgaacugugaucgccuucggcggccagaauaaagagcuggaaagguaucaaaaacaccucgagaacgccaaggagaucggcaucaagaaggccaucucugcaaacauuagcaugggcaucgccuuucugcugaucuaugccaguuaugcgcuagccuucugguacggaagcacacuggugauuuccaaggaguacaccaucggcaaugccaugaccguguucuucagcauccugaucggugcuuuuucaguggggcaggccgcccccuguauugaugccuucgccaaugcacggggggccgcuuacgugauauucgauaucauugauaacaaccccaagaucgauucuuucuccgagcgaggacacaagccagacucgauuaaaggcaaccuggaguucaacgaugugcacuuuucauaccccucaagggccaauguuaaaauccuuaaggguuugaaucugaagguccaaagcggccagaccguggcccuggugggcaguucaggauguggaaaguccaccaccguucagcucauccagagacuguacgacccugacgagggaacaaucaacaucgacggacaagacaucaggaacuucaaugucaacuaccuuagggaaaucaucggcguggugucacaggagcccgugcuguucuccaccaccauugcagaaaauaucugcuauggaagaggcaacgugaccauggacgaaaucaaaaaagccgugaaggaggccaacgccuacgaguuuaucaugaagcugccacaaaaguucgauacccuggugggcgaaaggggcgcccagcugagcggcgggcagaagcaacggaucgccaucgcucgcgcacuggugaggaaccccaagauccuccugcuggacgaagcgacaucugcccuggacaccgaguccgaagccgagguacaggcagcccucgacaaagcccgggaaggcaggacaaccaucgugauugcucacagacucaguaccgucagaaacgccgacgugauugccggcuucgaggacggcgugaucguugagcagggcucccauucagagcugaugaagaaagaaggaguguacuuuaagcucgucaauaugcagaccagcggcucucagauucagagcgaggaauuugagcugaaugaugagaaggccgcuacgcgcauggcucccaauggguggaagucacgccuguucaggcacuccacccagaagaaucugaagaacucccagaugugccagaagagccuggauguggaaaccgacggccuggaggcaaacgugccucccguauccuucuuaaaggugcugaagcugaacaagacagaguggcccuacuucguggugggcacugugugugcaauugccaauggcggccugcagccagcuuucuccgugauuuucuccgagauuaucgccaucuucgguccaggagacgacgcagugaaacagcagaaaugcaacauuuuuagcuugaucuuccucuuccucgggaucauuagcuucuucaccuuuuuccugcagggcuucaccuucgggaaggccggcgagauccugacccgcagguugagaucuauggccuucaaagccaugcucagacaggacaugagcugguucgacgaucacaagaacucaacaggcgcccuguccaccagacuggcuacagaugccgcacagguccagggcgcgaccggaacaagacuugcccugauugcccagaauauagcaaaccugggcaccggcauaaucauuuccuucauuuauggcuggcagcugacccugcugcugcuggccgucguucccaucaucgccguuagcggcaucguggagaugaagcuccucgccggaaaugccaaacgcgacaagaaggagcuggaagccgccgggaaaaucgccacggaggcaaucgaaaacaucaggaccguggugucccugacccaggagagaaaguucgagucuauguacguggagaaacuguauggacccuaccggaauuccguccagaaggcccacaucuacggcauaaccuuuagcaucagccaggccuucauguacuucagcuacgccggcuguuuccgguucggagccuaccugaucgugaauggccacaugagauucagagacgugauucugguguuuagcgccaucgucuucggagccguggcucucggacacgccuccagcuucgcccccgacuacgcuaaggccaagcugagugcagcccaccucuucaugcuauucgaaagacaaccgcugauagauucauacagcgaagaaggccugaagccugacaaguuugagggcaacaucaccuucaacgagguggucuucaacuaccccaccagagccaaugugcccgugcuccagggccucucccuggaggugaagaaggggcagacccuggcucuggugggcagcuccggcugcggcaaaaguaccguagugcagcuguuggagagauucuacgacccccuggcaggcacaguccuucuggauggucaggaagccaagaagcuuaaugugcaguggcugcgcgcccaacugggaaucgugagccaggagccgauccucuucgacugcucuaucgccgagaauauugcuuacggggacaacagcagagucgugagccaggaugaaauugugagcgccgcuaaagccgccaacauccacccuuucaucgagacucugccccacaaguacgagaccagagugggugauaaaggaacucagcugagcggcggacagaagcagagaauagccaucgccagagcccugaucagacagccucagauccugcugcuggacgaggcaacuucggccuuggauaccgaaagcgaaaagguggugcaggaggcccuggacaaggcaagagagggcagaaccugcaucgugaucgcccacaggcugagcacaauucagaacgcagaccugauugugguguuccaaaacggcagagugaaggagcacggcacccaccagcagcugcuggcucagaagggcaucuacuucagcauggugagcguucaggccggcacccagaaucuuugauaauaggcuggagccucgguggccaugcuucuugccccuugggccuccccccagccccuccuccccuuccugcacccguacccccguggucuuugaauaaagucugagugggcggc

SEQ ID NO: 27 - RNA, 3837 nt, Artificial Sequence
  Synthetic Polynucleotide
auggaccuugaagcugcaaagaacggcaccgccuggagacccacuuccgcggagggcgauuuugaacugggcaucuccagcaagcagaagaggaaaaagacaaagacaguuaaaaugaucggcgugcugacccuguucagauacagcgauuggcaagacaagcuguucaugagccugggcacaauuauggccaucgcacacggcuccggacugccucugaugaugaucgucuucggcgaaaugaccgacaaguucguagacacugcggggaacuucagcuucccugucaacuucagucucagcuuacugaacccuggcaagauccucgaggaggagaugaccagguacgccuacuauuacagcggacucggcgcgggcgugcugguggccgcauacauccagguguccuucuggacacuggcggcaggaagacagaucaggaaaaucaggcagaaguuuuuucaugcaauccugcgacaggagaucggcugguucgacauaaacgacaccaccgagcugaacaccaggcugacugacgacauuuccaagaucagcgaggggaucggcgacaaggugggcauguucuuccaggccguggccaccuucuucgccggcuucauagugggguuuauccggggcuggaaacugacacucgucaucauggccaucucaccgauccugggccugagcgcugcugugugggcaaagauccucuccgcauucagcgacaaggagcuggccgcuuacgccaaggccggcgccgucgcugaagaggcucugggggccauccgaacugugaucgccuucggcggccagaauaaagagcuggaaagguaucaaaaacaccucgagaacgccaaggagaucggcaucaagaaggccaucucugcaaacauuagcaugggcaucgccuuucugcugaucuaugccaguuaugcgcuagccuucugguacggaagcacacuggugauuuccaaggaguacaccaucggcaaugccaugaccguguucuucagcauccugaucggugcuuuuucaguggggcaggccgcccccuguauugaugccuucgccaaugcacggggggccgcuuacgugauauucgauaucauugauaacaaccccaagaucgauucuuucuccgagcgaggacacaagccagacucgauuaaaggcaaccuggaguucaacgaugugcacuuuucauaccccucaagggccaauguuaaaauccuuaaggguuugaaucugaagguccaaagcggccagaccguggcccuggugggcaguucaggauguggaaaguccaccaccguucagcucauccagagacuguacgacccugacgagggaacaaucaacaucgacggacaagacaucaggaacuucaaugucaacuaccuuagggaaaucaucggcguggugucacaggagcccgugcuguucuccaccaccauugcagaaaauaucugcuauggaagaggcaacgugaccauggacgaaaucaaaaaagccgugaaggaggccaacgccuacgaguuuaucaugaagcugccacaaaaguucgauacccuggugggcgaaaggggcgcccagcugagcggcgggcagaagcaacggaucgccaucgcucgcgcacuggugaggaaccccaagauccuccugcuggacgaagcgacaucugcccuggacaccgaguccgaagccgagguacaggcagcccucgacaaagcccgggaaggcaggacaaccaucgugauugcucacagacucaguaccgucagaaacgccgacgugauugccggcuucgaggacggcgugaucguugagcagggcucccauucagagcugaugaagaaagaaggaguguacuuuaagcucgucaauaugcagaccagcggcucucagauucagagcgaggaauuugagcugaaugaugagaaggccgcuacgcgcauggcucccaauggguggaagucacgccuguucaggcacuccacccagaagaaucugaagaacucccagaugugccagaagagccuggauguggaaaccgacggccuggaggcaaacgugccucccguauccuucuuaaaggugcugaagcugaacaagacagaguggcccuacuucguggugggcacugugugugcaauugccaauggcggccugcagccagcuuucuccgugauuuucuccgagauuaucgccaucuucgguccaggagacgacgcagugaaacagcagaaaugcaacauuuuuagcuugaucuuccucuuccucgggaucauuagcuucuucaccuuuuuccugcagggcuucaccuucgggaaggccggcgagauccugacccgcagguugagaucuauggccuucaaagccaugcucagacaggacaugagcugguucgacgaucacaagaacucaacaggcgcccuguccaccagacuggcuacagaugccgcacagguccagggcgcgaccggaacaagacuugcccugauugcccagaauauagcaaaccugggcaccggcauaaucauuuccuucauuuauggcuggcagcugacccugcugcugcuggccgucguucccaucaucgccguuagcggcaucguggagaugaagcuccucgccggaaaugccaaacgcgacaagaaggagcuggaagccgccgggaaaaucgccacggaggcaaucgaaaacaucaggaccguggugucccugacccaggagagaaaguucgagucuauguacguggagaaacuguauggacccuaccggaauuccguccagaaggcccacaucuacggcauaaccuuuagcaucagccaggccuucauguacuucagcuacgccggcuguuuccgguucggagccuaccugaucgugaauggccacaugagauucagagacgugauucugguguuuagcgccaucgucuucggagccguggcucucggacacgccuccagcuucgcccccgacuacgcuaaggccaagcugagugcagcccaccucuucaugcuauucgaaagacaaccgcugauagauucauacagcgaagaaggccugaagccugacaaguuugagggcaacaucaccuucaacgagguggucuucaacuaccccaccagagccaaugugcccgugcuccagggccucucccuggaggugaagaaggggcagacccuggcucuggugggcagcuccggcugcggcaaaaguaccguagugcagcuguuggagagauucuacgacccccuggcaggcacaguccuucuggauggucaggaagccaagaagcuuaaugugcaguggcugcgcgcccaacugggaaucgugagccaggagccgauccucuucgacugcucuaucgccgagaauauugcuuacggggacaacagcagagucgugagccaggaugaaauugugagcgccgcuaaagccgccaacauccacccuuucaucgagacucugccccacaaguacgagaccagagugggugauaaaggaacucagcugagcggcggacagaagcagagaauagccaucgccagagcccugaucagacagccucagauccugcugcuggacgaggcaacuucggccuuggauaccgaaagcgaaaagguggugcaggaggcccuggacaaggcaagagagggcagaaccugcaucgugaucgcccacaggcugagcacaauucagaacgcagaccugauugugguguuccaaaacggcagagugaaggagcacggcacccaccagcagcugcuggcucagaagggcaucuacuucagcauggugagcguucaggccggcacccagaaucuu

SEQ ID NO: 28 - protein, 1279 aa, Artificial Sequence; identical to SEQ ID NO: 3
  Synthetic Polypeptide

SEQ ID NO: 29 - RNA, 4003 nt, Artificial Sequence
  Synthetic Polynucleotide
gggaaauaagagagaaaagaagaguaagaagaaauauaagagccaccauggauuuggaggccgcuaagaacggcacagccuggcgccccaccagcgccgagggcgacuucgagcugggcauuagcagcaagcagaagaggaaaaagacaaagaccgucaaaaugaucggagugcugacccuguuuagguacagugacuggcaggacaaacucuuuaugagccugggaaccaucauggccauugcccacggcagcggccucccccugaugaugauugucuuuggggagaugaccgauaaguuuguggauaccgccggcaacuucuccuuccccgucaacuucagccugagccugcugaaucccgguaagauucuggaagaggagaugacccgguacgccuacuauuacucaggcuugggugccggcguuuugguggccgcauacauccagguuucuuucuggacucuggcagccggucgccagauccggaaaaucagacagaaguucuuccacgccauccugagacaggagaucggaugguuugacaucaaugacaccacagaacugaacacuagacucaccgacgacaucucaaaaaucucugagggcaucggagauaaggugggcauguucuuccaggccguggccaccuuuuuugccggauucauugugggcuuuauaagaggcuggaaacugacacuggugauuauggccaucagccccauccugggucuuagcgccgccgucugggccaaaauccugagcgcuuuuagcgacaaggagcuugccgccuacgcuaaggccggggccguggccgaggaggcccugggggcaaucagaaccgugauagccuucgggggccagaauaaggagcuggaaagguaccagaagcaccucgagaaugcuaaggagaucggaaucaagaaggcgaucucagccaauaucuccauggguauugccuucuugcugauuuaugcuagcuacgcccuggccuucugguacggcagcacacucguuauuagcaaggaguacacaauuggaaacgcaaugaccguauucuucagcauucugaucggcgccuucagcgugggccaggcugccccuugcaucgaugccuucgcuaacgccaggggggccgccuacgucaucuucgacaucaucgauaacaauccuaaaaucgacaguuuuucugagagaggccauaaaccugacagcaucaagggcaaucuggaguucaacgacguccacuucagcuacccaucacgggccaaugucaaaauccugaagggccugaaccugaaggugcaauccggucagacaguugcccuggugggcucuagugggugcgggaagagcacuaccguccagcugauucagcggcuguacgaucccgaugagggaaccauuaacaucgacggccaggacauccggaacuucaacgugaauuaccugagagagaucauuggcguggugagucaggaaccaguccuguucucuaccacaauugccgaaaauauuugcuauggcagaggaaacgugaccauggacgaaauuaagaaggcuguuaaagaagcgaaugcuuacgaguucauuaugaagcugccccagaaguucgacacgcuggugggggaacguggggcccagcugagcggaggccaaaagcagcgcauagccaucgcuagggcccuggugcgcaaccccaagauccuccugcuggacgaggccacuucagcucuggauacugagagcgaagcugagguccaggcugcccuggacaaggcucgggaaggaagaacaaccaucguuaucgcccacaggcugagcacagugaggaacgcggacguuauugccggcuucgaggacggcgugaucguggagcagggcagccacagugagcugaugaagaaggaggguguauacuuuaagcuggugaauaugcagacgaguggaagccaaauacaguccgaggaguucgagcugaaugacgagaaggcugcaaccaggauggcccccaauggcuggaagagcagacucuucaggcacagcacucagaagaaccugaagaacucacagaugugucagaaaagcuuagauguugagaccgauggcuuggaggccaacgugccacccgugagcuuucugaaggugcugaaacugaacaagaccgaguggccuuacuucguugugggcaccgugugcgcuauugccaacggcggacugcagcccgccuucagugugauauucuccgagauaaucgcaaucuuuggccccggggacgaugcugugaagcagcagaagugcaacauuuucagccugauuuuccuguuccuggggaucauuaguuucuucaccuucuuccuccagggcuucaccuucgguaaggccggggagauccugaccagacggcugagaaguauggccuucaaagccaugcugaggcaggacaugaguugguucgacgaccacaagaauucuacuggggcccugagcaccaggcuugcuaccgacgccgcccaggugcagggcgccaccgguacaagacuggcccucauagcccagaacauagccaaccugggcacaggcaucaucauauccuucauuuacggauggcaguugacacugcugcugcuugccguuguccccaucaucgccgucaguggcaucgucgagaugaaacugcucgccggcaacgccaaacgggauaagaaggaacuggaggccgccggcaagauugcuacugaggcuaucgagaauauuagaaccgucgugucauugacccaggagagaaaguuugagagcauguacguggagaagcuguacggcccauauagaaauuccgugcagaaggcccacaucuauggcaucacauucucaauuucccaggccuucauguacuuuucuuaugccggcugcuuuagauucggcgccuacuugauugugaacggccacaugagguuuagggacgugauccuggucuuuagcgccaucguguucggcgccguggcccugggccacgccagcagcuucgccccggacuacgcuaaggccaaacuuagcgcagcccaccuguucaugcuguucgagcgacagccccugaucgacuccuauagcgaggagggacugaagccagauaaguucgaaggaaauaucaccuucaacgagguugucuuuaacuacccuaccagagccaacguucccgugcugcagggacugucccuugaggugaaaaagggccagacacuggcccuggugggcagcuccggcuguggcaaauccacaguggugcagcuccuggagagauucuacgacccucucgccgggacagugcugcuggauggccaggaagcuaaaaagcugaacguccaguggcugagggcccagcuggggauagugagccaggagcccauccucuuugacuguaguauagccgagaacaucgcauacggagacaacagcagaguggugucacaggacgaaaucgucucagccgcuaaagccgcuaauauucaccccuucaucgaaacuuuaccucauaaguacgagacaagagugggcgacaaggggacucaguuaagcggcggacagaagcagagaaucgcuaucgccagggcacucaucagacagccgcagauccuccuguuggacgaagccaccagcgcccuggauaccgaaagugagaaaguggugcaggaagcccuggacaaggccagagagggcaggaccuguaucgugaucgcacacaggcugagcaccauucagaacgccgaccugaucgugguguuucagaacggacgugugaaggagcacgguacucaucagcagcuguuggcccagaagggaaucuacuucucaaugguuaguguacaagccggcacccagaaucugugauaauaggcuggagccucgguggccaugcuucuugccccuugggccuccccccagccccuccuccccuuccugcacccguacccccguggucuuugaauaaagucugagugggcggc

SEQ ID NO: 30 - RNA, 3837 nt, Artificial Sequence
  Synthetic Polynucleotide
auggauuuggaggccgcuaagaacggcacagccuggcgccccaccagcgccgagggcgacuucgagcugggcauuagcagcaagcagaagaggaaaaagacaaagaccgucaaaaugaucggagugcugacccuguuuagguacagugacuggcaggacaaacucuuuaugagccugggaaccaucauggccauugcccacggcagcggccucccccugaugaugauugucuuuggggagaugaccgauaaguuuguggauaccgccggcaacuucuccuuccccgucaacuucagccugagccugcugaaucccgguaagauucuggaagaggagaugacccgguacgccuacuauuacucaggcuugggugccggcguuuugguggccgcauacauccagguuucuuucuggacucuggcagccggucgccagauccggaaaaucagacagaaguucuuccacgccauccugagacaggagaucggaugguuugacaucaaugacaccacagaacugaacacuagacucaccgacgacaucucaaaaaucucugagggcaucggagauaaggugggcauguucuuccaggccguggccaccuuuuuugccggauucauugugggcuuuauaagaggcuggaaacugacacuggugauuauggccaucagccccauccugggucuuagcgccgccgucugggccaaaauccugagcgcuuuuagcgacaaggagcuugccgccuacgcuaaggccggggccguggccgaggaggcccugggggcaaucagaaccgugauagccuucgggggccagaauaaggagcuggaaagguaccagaagcaccucgagaaugcuaaggagaucggaaucaagaaggcgaucucagccaauaucuccauggguauugccuucuugcugauuuaugcuagcuacgcccuggccuucugguacggcagcacacucguuauuagcaaggaguacacaauuggaaacgcaaugaccguauucuucagcauucugaucggcgccuucagcgugggccaggcugccccuugcaucgaugccuucgcuaacgccaggggggccgccuacgucaucuucgacaucaucgauaacaauccuaaaaucgacaguuuuucugagagaggccauaaaccugacagcaucaagggcaaucuggaguucaacgacguccacuucagcuacccaucacgggccaaugucaaaauccugaagggccugaaccugaaggugcaauccggucagacaguugcccuggugggcucuagugggugcgggaagagcacuaccguccagcugauucagcggcuguacgaucccgaugagggaaccauuaacaucgacggccaggacauccggaacuucaacgugaauuaccugagagagaucauuggcguggugagucaggaaccaguccuguucucuaccacaauugccgaaaauauuugcuauggcagaggaaacgugaccauggacgaaauuaagaaggcuguuaaagaagcgaaugcuuacgaguucauuaugaagcugccccagaaguucgacacgcuggugggggaacguggggcccagcugagcggaggccaaaagcagcgcauagccaucgcuagggcccuggugcgcaaccccaagauccuccugcuggacgaggccacuucagcucuggauacugagagcgaagcugagguccaggcugcccuggacaaggcucgggaaggaagaacaaccaucguuaucgcccacaggcugagcacagugaggaacgcggacguuauugccggcuucgaggacggcgugaucguggagcagggcagccacagugagcugaugaagaaggaggguguauacuuuaagcuggugaauaugcagacgaguggaagccaaauacaguccgaggaguucgagcugaaugacgagaaggcugcaaccaggauggcccccaauggcuggaagagcagacucuucaggcacagcacucagaagaaccugaagaacucacagaugugucagaaaagcuuagauguugagaccgauggcuuggaggccaacgugccacccgugagcuuucugaaggugcugaaacugaacaagaccgaguggccuuacuucguugugggcaccgugugcgcuauugccaacggcggacugcagcccgccuucagugugauauucuccgagauaaucgcaaucuuuggccccggggacgaugcugugaagcagcagaagugcaacauuuucagccugauuuuccuguuccuggggaucauuaguuucuucaccuucuuccuccagggcuucaccuucgguaaggccggggagauccugaccagacggcugagaaguauggccuucaaagccaugcugaggcaggacaugaguugguucgacgaccacaagaauucuacuggggcccugagcaccaggcuugcuaccgacgccgcccaggugcagggcgccaccgguacaagacuggcccucauagcccagaacauagccaaccugggcacaggcaucaucauauccuucauuuacggauggcaguugacacugcugcugcuugccguuguccccaucaucgccgucaguggcaucgucgagaugaaacugcucgccggcaacgccaaacgggauaagaaggaacuggaggccgccggcaagauugcuacugaggcuaucgagaauauuagaaccgucgugucauugacccaggagagaaaguuugagagcauguacguggagaagcuguacggcccauauagaaauuccgugcagaaggcccacaucuauggcaucacauucucaauuucccaggccuucauguacuuuucuuaugccggcugcuuuagauucggcgccuacuugauugugaacggccacaugagguuuagggacgugauccuggucuuuagcgccaucguguucggcgccguggcccugggccacgccagcagcuucgccccggacuacgcuaaggccaaacuuagcgcagcccaccuguucaugcuguucgagcgacagccccugaucgacuccuauagcgaggagggacugaagccagauaaguucgaaggaaauaucaccuucaacgagguugucuuuaacuacccuaccagagccaacguucccgugcugcagggacugucccuugaggugaaaaagggccagacacuggcccuggugggcagcuccggcuguggcaaauccacaguggugcagcuccuggagagauucuacgacccucucgccgggacagugcugcuggauggccaggaagcuaaaaagcugaacguccaguggcugagggcccagcuggggauagugagccaggagcccauccucuuugacuguaguauagccgagaacaucgcauacggagacaacagcagaguggugucacaggacgaaaucgucucagccgcuaaagccgcuaauauucaccccuucaucgaaacuuuaccucauaaguacgagacaagagugggcgacaaggggacucaguuaagcggcggacagaagcagagaaucgcuaucgccagggcacucaucagacagccgcagauccuccuguuggacgaagccaccagcgcccuggauaccgaaagugagaaaguggugcaggaagcccuggacaaggccagagagggcaggaccuguaucgugaucgcacacaggcugagcaccauucagaacgccgaccugaucgugguguuucagaacggacgugugaaggagcacgguacucaucagcagcuguuggcccagaagggaaucuacuucucaaugguuaguguacaagccggcacccagaaucug

SEQ ID NO: 31 - protein, 1279 aa, Artificial Sequence; identical to SEQ ID NO: 3
  Synthetic Polypeptide

SEQ ID NO: 32 - RNA, 4051 nt, Artificial Sequence
  Synthetic Polynucleotide
gggaaauaagagagaaaagaagaguaagaagaaauauaagagccaccauggaccuggaggcagccaagaacggcaccgcuuggaggccgacaucagccgagggagacuucgaacugggaaucuccaguaaacaaaagagaaagaagaccaagacagugaaaaugaucggagugcugacacuguucagguacuccgacuggcaggacaagcucuuuaugucccucggcaccaucauggccauugcucacggcagcggccugccuuuaaugaugaucguuuucggggagaugaccgacaaauucguggauacagccggaaacuucucguuccccgugaacuuuagccugagccugcugaauccugggaaaauccuggaggaggaaaugaccagguacgccuacuacuacagcggccugggggcuggcgugcugguggccgccuacauccagguguccuucuggacucuggccgccggcagacagaucaggaagaucagacagaaguucuuccacgcuauucugaggcaggaaauugggugguucgacaucaacgacacuaccgagcuuaacacgagacugaccgacgacauuagcaagaucucugaaggcaucggugauaaggugggcauguucuuccaagccguggccaccuuuuucgcaggguucaucgugggauuuauccggggcuggaagcuuacccuggucaucauggcuaucagcccgauucugggccucagcgccgcaguuugggccaagauccuguccgcuuucuccgacaaggagcucgccgccuacgccaaggcuggugcaguggcugaggaggcccuuggagccauucguaccgugaucgccuuuggcggccagaacaaagagcuagagagauaccaaaaacacuuggagaacgccaaggagaucggcauuaagaaggccaucucugccaacauuuccauggggaucgccuuccugcugaucuacgccagcuacgcccuggcuuuuugguacggcaguacgcuggugauuagcaaggaguacaccaucggcaacgccaugaccguguuuuucuccauucucaucggagcauucuccgugggccaggcugcccccugcaucgacgcguucgccaaugccagaggcgccgccuaugugauuuucgacaucaucgacaauaacccaaagaucgacaguuucucugaacguggacacaaaccagacagcaucaaaggaaaucuggaguucaacgacgugcacuucagcuacccauccagggccaacgugaagauucugaagggcuuaaaccugaaggugcagaguggacagaccguggcccugguggggucuucuggcugcggcaagagcaccaccgugcagcucauucagagacuuuaugaccccgaugagggcacuauaaacaucgauggccaggacaucaggaacuucaaugugaacuacuuaagggaaauuaucggcguggugagccaggagcccgugcuguucucuaccacgauugcagagaauaucugcuacgggagaggcaacgugaccauggacgaaaucaaaaaagcuguaaaagaggcuaacgcuuacgaguucauuaugaaacuaccccagaaguucgauacccucgugggggagaggggugcacagcugagcgguggccagaagcagaggaucgccauagcaagagcccuggugagaaaccccaaaauccuccuuuuggaugaggccaccuccgcccucgacaccgagagcgaagccgaggugcaggccgcccucgacaaggccagggagggccgcaccaccauugugaucgcccacaggcugagcaccgugagaaacgccgacgugauugccggauucgaggacggcgugaucguggagcagggcagccacagcgagcucaugaaaaaggaaggcgucuacuucaaacuggugaauaugcagaccucggguagccaaauccaguccgaggaguuugaguuaaacgacgagaaggccgccacccggauggcccccaauggguggaagagccgccuguuuaggcacucaacccaaaagaaccugaagaacucccagaugugucagaaaucacuggacguggaaaccgacgggcuggaagcuaacgugccucccgugaguuuccugaaggugcugaagcugaacaagacggaguggcccuauuuugucguuggaacagugugcgcaaucgccaacggcggccuccagccggcauuuagcgugauuuucagcgagaucaucgccauauucggcccuggggaugacgcugucaagcagcagaaaugcaacaucuucagccuaauauuucucuuucugggaauuaucagcuucuucaccuucuuccugcagggguuuaccuucggaaaagccggcgagauccucacccgcagacugagauccauggccuucaaggccaugcugaggcaggauauguccugguucgaugaccacaagaacagcaccggcgcccugagcaccaggcuggccacugaugccgcucagguccagggugcuacaggcacccgccuugcccugauugcccagaacauugcuaaccuggggaccgggaucaucaucagcuuuaucuacggguggcagcugacccucuuacugcuggccguggugccaaucaucgccgugagcgggaucguggagaugaagcugcuggccggaaaugcuaagagagauaagaaggagcuggaggccgccggaaagaucgccacagaggccaucgaaaacauuagaacuguagugagccugacccaggagagaaaguuugagagcauguacguggagaagcucuacggacccuacaggaacuccgugcagaaggcacacaucuacggcaucacuuucucgauuagccaggccuucauguacuuuagcuaugccgguugcuucagguuuggugcuuaccugaucgucaauggccacaugagguuuagagacgucauccugguguuuagcgccaucgucuucggagcuguggcucugggccacgccuccagcuucgccccugacuacgccaaggccaagcugagcgccgcccaucuguucaugcuguuugaacgucagccacugaucgacucauauagcgaggaagggcugaaacccgauaaauucgagggaaauauuacauucaaugagguuguauucaacuacccuaccagagccaacgugccugugcugcagggccugucccuggaggugaaaaagggacagacccuggcucuggugggcucuagcggcuguggcaagagcaccguggugcagcugcuggagagauuuuacgauccucuggccggcacagugcugcuggacggccaggaggcuaaaaaacugaaugugcaguggcugcgggcucaacugggcaucgugucccaggagcccauacuguucgauuguagcaucgccgaaaauauugccuacggagacaauagcagagugguuucacaagaugagauuguaagugccgccaaggccgccaacauccaccccuucaucgaaacacucccccacaaguacgagacaaggguuggagauaagggcacccagcuguccgguggccagaaacagagaaucgccaucgcccgggcucugaucagacagccucagauccuccuguuggacgaggcuacuuccgccuuggacaccgaaucggagaaaguggugcaggaggcccucgacaaggcuagagagggaagaaccuguauugugaucgcgcauaggcucagcaccauccagaaugccgaucugaucgucguguuccaaaacggacgcgugaaggagcacggcacccaccagcaauugcucgcacagaaagggaucuacuucagcaugguguccgugcaggcaggcacccagaaucuggacuacaaggacgacgacgacaaggacuacaaggacgacgacgacaagugauaauaggcuggagccucgguggccaugcuucuugccccuugggccuccccccagccccuccuccccuuccugcacccguacccccguggucuuugaauaaagucugagugggcggc

SEQ ID NO: 33 - RNA, 3885 nt, Artificial Sequence
  Synthetic Polynucleotide
auggaccuggaggcagccaagaacggcaccgcuuggaggccgacaucagccgagggagacuucgaacugggaaucuccaguaaacaaaagagaaagaagaccaagacagugaaaaugaucggagugcugacacuguucagguacuccgacuggcaggacaagcucuuuaugucccucggcaccaucauggccauugcucacggcagcggccugccuuuaaugaugaucguuuucggggagaugaccgacaaauucguggauacagccggaaacuucucguuccccgugaacuuuagccugagccugcugaauccugggaaaauccuggaggaggaaaugaccagguacgccuacuacuacagcggccugggggcuggcgugcugguggccgccuacauccagguguccuucuggacucuggccgccggcagacagaucaggaagaucagacagaaguucuuccacgcuauucugaggcaggaaauugggugguucgacaucaacgacacuaccgagcuuaacacgagacugaccgacgacauuagcaagaucucugaaggcaucggugauaaggugggcauguucuuccaagccguggccaccuuuuucgcaggguucaucgugggauuuauccggggcuggaagcuuacccuggucaucauggcuaucagcccgauucugggccucagcgccgcaguuugggccaagauccuguccgcuuucuccgacaaggagcucgccgccuacgccaaggcuggugcaguggcugaggaggcccuuggagccauucguaccgugaucgccuuuggcggccagaacaaagagcuagagagauaccaaaaacacuuggagaacgccaaggagaucggcauuaagaaggccaucucugccaacauuuccauggggaucgccuuccugcugaucuacgccagcuacgcccuggcuuuuugguacggcaguacgcuggugauuagcaaggaguacaccaucggcaacgccaugaccguguuuuucuccauucucaucggagcauucuccgugggccaggcugcccccugcaucgacgcguucgccaaugccagaggcgccgccuaugugauuuucgacaucaucgacaauaacccaaagaucgacaguuucucugaacguggacacaaaccagacagcaucaaaggaaaucuggaguucaacgacgugcacuucagcuacccauccagggccaacgugaagauucugaagggcuuaaaccugaaggugcagaguggacagaccguggcccugguggggucuucuggcugcggcaagagcaccaccgugcagcucauucagagacuuuaugaccccgaugagggcacuauaaacaucgauggccaggacaucaggaacuucaaugugaacuacuuaagggaaauuaucggcguggugagccaggagcccgugcuguucucuaccacgauugcagagaauaucugcuacgggagaggcaacgugaccauggacgaaaucaaaaaagcuguaaaagaggcuaacgcuuacgaguucauuaugaaacuaccccagaaguucgauacccucgugggggagaggggugcacagcugagcgguggccagaagcagaggaucgccauagcaagagcccuggugagaaaccccaaaauccuccuuuuggaugaggccaccuccgcccucgacaccgagagcgaagccgaggugcaggccgcccucgacaaggccagggagggccgcaccaccauugugaucgcccacaggcugagcaccgugagaaacgccgacgugauugccggauucgaggacggcgugaucguggagcagggcagccacagcgagcucaugaaaaaggaaggcgucuacuucaaacuggugaauaugcagaccucggguagccaaauccaguccgaggaguuugaguuaaacgacgagaaggccgccacccggauggcccccaauggguggaagagccgccuguuuaggcacucaacccaaaagaaccugaagaacucccagaugugucagaaaucacuggacguggaaaccgacgggcuggaagcuaacgugccucccgugaguuuccugaaggugcugaagcugaacaagacggaguggcccuauuuugucguuggaacagugugcgcaaucgccaacggcggccuccagccggcauuuagcgugauuuucagcgagaucaucgccauauucggcccuggggaugacgcugucaagcagcagaaaugcaacaucuucagccuaauauuucucuuucugggaauuaucagcuucuucaccuucuuccugcagggguuuaccuucggaaaagccggcgagauccucacccgcagacugagauccauggccuucaaggccaugcugaggcaggauauguccugguucgaugaccacaagaacagcaccggcgcccugagcaccaggcuggccacugaugccgcucagguccagggugcuacaggcacccgccuugcccugauugcccagaacauugcuaaccuggggaccgggaucaucaucagcuuuaucuacggguggcagcugacccucuuacugcuggccguggugccaaucaucgccgugagcgggaucguggagaugaagcugcuggccggaaaugcuaagagagauaagaaggagcuggaggccgccggaaagaucgccacagaggccaucgaaaacauuagaacuguagugagccugacccaggagagaaaguuugagagcauguacguggagaagcucuacggacccuacaggaacuccgugcagaaggcacacaucuacggcaucacuuucucgauuagccaggccuucauguacuuuagcuaugccgguugcuucagguuuggugcuuaccugaucgucaauggccacaugagguuuagagacgucauccugguguuuagcgccaucgucuucggagcuguggcucugggccacgccuccagcuucgccccugacuacgccaaggccaagcugagcgccgcccaucuguucaugcuguuugaacgucagccacugaucgacucauauagcgaggaagggcugaaacccgauaaauucgagggaaauauuacauucaaugagguuguauucaacuacccuaccagagccaacgugccugugcugcagggccugucccuggaggugaaaaagggacagacccuggcucuggugggcucuagcggcuguggcaagagcaccguggugcagcugcuggagagauuuuacgauccucuggccggcacagugcugcuggacggccaggaggcuaaaaaacugaaugugcaguggcugcgggcucaacugggcaucgugucccaggagcccauacuguucgauuguagcaucgccgaaaauauugccuacggagacaauagcagagugguuucacaagaugagauuguaagugccgccaaggccgccaacauccaccccuucaucgaaacacucccccacaaguacgagacaaggguuggagauaagggcacccagcuguccgguggccagaaacagagaaucgccaucgcccgggcucugaucagacagccucagauccuccuguuggacgaggcuacuuccgccuuggacaccgaaucggagaaaguggugcaggaggcccucgacaaggcuagagagggaagaaccuguauugugaucgcgcauaggcucagcaccauccagaaugccgaucugaucgucguguuccaaaacggacgcgugaaggagcacggcacccaccagcaauugcucgcacagaaagggaucuacuucagcaugguguccgugcaggcaggcacccagaaucuggacuacaaggacgacgacgacaaggacuacaaggacgacgacgacaag

SEQ ID NO: 34 - protein, 1295 aa, Artificial Sequence
  Synthetic Polypeptide
MDLEAAKNGTAWRPTSAEGDFELGISSKQKRKKTKTVKMIGVLTLFRYSDWQDKLFMSLGTIMAIAHGSGLPLMMIVFGEMTDKFVDTAGNFSFPVNFSLSLLNPGKILEEEMTRYAYYYSGLGAGVLVAAYIQVSFWTLAAGRQIRKIRQKFFHAILRQEIGWFDINDTTELNTRLTDDISKISEGIGDKVGMFFQAVATFFAGFIVGFIRGWKLTLVIMAISPILGLSAAVWAKILSAFSDKELAAYAKAGAVAEEALGAIRTVIAFGGQNKELERYQKHLENAKEIGIKKAISANISMGIAFLLIYASYALAFWYGSTLVISKEYTIGNAMTVFFSILIGAFSVGQAAPCIDAFANARGAAYVIFDIIDNNPKIDSFSERGHKPDSIKGNLEFNDVHFSYPSRANVKILKGLNLKVQSGQTVALVGSSGCGKSTTVQLIQRLYDPDEGTINIDGQDIRNFNVNYLREIIGVVSQEPVLFSTTIAENICYGRGNVTMDEIKKAVKEANAYEFIMKLPQKFDTLVGERGAQLSGGQKQRIAIARALVRNPKILLLDEATSALDTESEAEVQAALDKAREGRTTIVIAHRLSTVRNADVIAGFEDGVIVEQGSHSELMKKEGVYFKLVNMQTSGSQIQSEEFELNDEKAATRMAPNGWKSRLFRHSTQKNLKNSQMCQKSLDVETDGLEANVPPVSFLKVLKLNKTEWPYFVVGTVCAIANGGLQPAFSVIFSEIIAIFGPGDDAVKQQKCNIFSLIFLFLGIISFFTFFLQGFTFGKAGEILTRRLRSMAFKAMLRQDMSWFDDHKNSTGALSTRLATDAAQVQGATGTRLALIAQNIANLGTGIIISFIYGWQLTLLLLAVVPIIAVSGIVEMKLLAGNAKRDKKELEAAGKIATEAIENIRTVVSLTQERKFESMYVEKLYGPYRNSVQKAHIYGITFSISQAFMYFSYAGCFRFGAYLIVNGHMRFRDVILVFSAIVFGAVALGHASSFAPDYAKAKLSAAHLFMLFERQPLIDSYSEEGLKPDKFEGNITFNEVVFNYPTRANVPVLQGLSLEVKKGQTLALVGSSGCGKSTVVQLLERFYDPLAGTVLLDGQEAKKLNVQWLRAQLGIVSQEPILFDCSIAENIAYGDNSRVVSQDEIVSAAKAANIHPFIETLPHKYETRVGDKGTQLSGGQKQRIAIARALIRQPQILLLDEATSALDTESEKVVQEALDKAREGRTCIVIAHRLSTIQNADLIVVFQNGRVKEHGTHQQLLAQKGIYFSMVSVQAGTQNLDYKDDDDKDYKDDDDK

SEQ ID NO: 35 - RNA, 4051 nt, Artificial Sequence
  Synthetic Polynucleotide
gggaaauaagagagaaaagaagaguaagaagaaauauaagagccaccauggaccuagaggccgcgaagaacggcaccgccuggagaccuaccuccgccgagggggacuucgaguuggguaucagcucuaaacagaagaggaagaaaaccaagacugugaaaaugauaggcgugcugacccucuucagauacuccgacuggcaggacaagcuguucaugucccucggcaccaucauggcuaucgcccauggaucuggacugccccuuaugaugaucguuuucggggagaugaccgacaaguucguggacaccgcaggaaacuucuccuuccccgugaacuucagcuugagccuguugaacccaggcaagauacucgaggaggagaugacccgcuacgccuacuacuacagcggccucggcgccggggugcugguggcagcuuauauccaggugagcuucuggacgcuggcugccggccgacagauucgcaagauccgccagaaauucuuccacgccauccuuaggcaggagaucggcugguucgauaucaacgacaccacagagcugaauacucggcuaaccgacgacauuagcaagaucagcgagggaaucggcgacaaggugggcauguuuuuccaagcuguggcuaccuucuucgccggcuucaucguaggauucauuagaggauggaagcugacccuggugaucauggcuaucagcccaaucuugggccuguccgcugccgugugggccaaaauucugucugcguuuucagauaaggagcuggccgccuacgccaaggcaggcgcugucgccgaggaggcucugggcgccaucagaacugugaucgccuucgguggacagaacaaggaguuggaaagauaucagaagcacuuggagaacgccaaggagaucggcaucaagaaggccaucucugccaauaucagcaugggcaucgcguuucugcugauuuacgccagcuacgcacuggccuucugguauggcucuaccuuggucaucagcaaggaguacaccaucggcaacgcuaugacuguguucuucuccauucugaucggcgcauucagcgugggacaggccgccccuugcaucgacgcuuucgccaacgccaggggcgccgccuacgucaucuuugacauuaucgacaacaaccccaaaaucgacucuuucagcgaaagaggccacaaacccgacuccaucaaggguaaccuggaguucaacgauguccauuucuccuacccuucuagggccaacgugaagauccugaagggccuaaaucugaaggugcagucaggacagaccgucgcucugguggguagcuccggcugcggcaaguccaccacagugcagcuuauccagagguuguaugacccugaugaaggcaccauuaauaucgacggccaggacaucaggaauuuuaaugugaauuaccugagagagauuaucggcguggucagccaggagcccguccuauucagcacaacaauagccgaaaacaucuguuauggcagggggaacgucacaauggaugagaucaagaaggccgugaaagaggcuaacgcauacgaauuuaucaugaagcucccucagaaguucgacacuuuggugggcgagagaggcgcccaacugagcggcggccagaagcagagaaucgcaaucgcuagagcccucguccggaauccaaagauccugcugcucgacgaggccacaagcgcucuugacaccgagucagaggccgaggugcaagcugcccuggacaaagcccgggagggcagaaccaccaucgugauugcccacaggcuguccaccguuagaaaugcggacgucaucgccggguucgaggacggggugauuguggagcagggcagccauagcgagcucaugaagaaggagggaguguacuucaagcuggucaauaugcagaccaguggcucucagauccagagcgaggaguucgagcugaacgacgagaaggccgccacuagaauggcccccaauggcuggaaaagcagacucuucagacacagcacgcagaagaaccugaagaacagucagaugugccagaagagucuggacgucgagaccgacggccuggaggccaacgugccccccgucaguuuccugaaggugcugaaacuaaacaaaacugaguggccuuacuucguuguaggaaccgucugcgcuaucgccaacgggggacugcagcccgccuuuagcgugaucuuuagcgaaaucaucgccaucuuuggccccggcgacgacgcugugaagcagcagaagugcaauaucuucucuuugaucuuucuguuccugggcaucaucucauucuuuacauuuuuucuccagggcuucaccuucggcaaggccggagagauucugaccagaagacugagaagcauggccuucaaggcuaugcugaggcaggacaugagcugguuugacgaucacaagaacagcacuggcgcccugagcacaagacuggcuaccgacgccgcacaggugcagggcgccaccgggacuagguuggcucugaucgcccagaauaucgccaaucugggcacuggcauuauuauuagcuucaucuauggcuggcagcugacccugcugcugcuggccguugugcccaucaucgcugugucaggcaucguggaaaugaagcuccucgcuggcaacgccaaaagggacaagaaggagcuggaggccgcaggcaagauugccaccgaggccaucgagaauauccgcaccgucgugagcuugacccaggaaagaaaguucgagagcauguacguagagaaacuguacggacccuaccgcaauuccguacagaaggcucauaucuacgggaucacuuuuuccaucucccaggccuucauguacuuuagcuacgccggcugcuuuagauucggugccuacuugaucgugaacggacacaugcgauucagagaugugauucugguguuuagcgcuauuguguucggcgccgucgcccucgggcacgccagcagcuucgcccccgacuacgcgaaggcuaagcucucagcugcgcaccuguucaugcuguucgagcgccagccccucaucgacuccuacagcgaagagggauuaaagccggauaaauucgagggcaacaucaccuuuaacgaggugguauuuaacuauccaacccgcgccaacgugccgguucugcaaggacucagccuugaggucaagaagggccagacccuugcgcucgucggcuccagcggcugcggcaaaagcaccgucgugcagcugcuggagagauucuaugacccccuggccgggacugugcugcuggacggccaggaggcuaagaagcugaacgugcaguggcuccgggcucagcugggaaucgugagccaggaaccgauacuguuugacugcagcaucgcugagaacaucgccuauggagauaacagcaggguggugucccaggaugaaauugugagcgcugccaaagccgccaacauccacccuuucaucgagacucugccccauaaguacgagaccagagugggcgacaaagguacacagcuguccggagggcagaagcagagaauugccaucgccagggccuugauuagacagccgcagauccuucugcuggacgaggccacuucugcccuggacaccgaauccgagaagguugugcaggaagcccuggacaaggcaagagagggccguaccugcaucgugaucgcccacagacugagcacgauccagaacgcagaucugaucgucguguuccagaacggaagaguuaaagagcaugggacacaccagcagcuccuggcucagaagggcaucuauuucuccauggugagcgugcaggccggcacccagaaccuggacuacaaggacgacgacgacaaggacuacaaggacgacgacgacaagugauaauaggcuggagccucgguggccaugcuucuugccccuugggccuccccccagccccuccuccccuuccugcacccguacccccguggucuuugaauaaagucugagugggcggc

SEQ ID NO: 36 - RNA, 3885 nt, Artificial Sequence
  Synthetic Polynucleotide
auggaccuagaggccgcgaagaacggcaccgccuggagaccuaccuccgccgagggggacuucgaguuggguaucagcucuaaacagaagaggaagaaaaccaagacugugaaaaugauaggcgugcugacccucuucagauacuccgacuggcaggacaagcuguucaugucccucggcaccaucauggcuaucgcccauggaucuggacugccccuuaugaugaucguuuucggggagaugaccgacaaguucguggacaccgcaggaaacuucuccuuccccgugaacuucagcuugagccuguugaacccaggcaagauacucgaggaggagaugacccgcuacgccuacuacuacagcggccucggcgccggggugcugguggcagcuuauauccaggugagcuucuggacgcuggcugccggccgacagauucgcaagauccgccagaaauucuuccacgccauccuuaggcaggagaucggcugguucgauaucaacgacaccacagagcugaauacucggcuaaccgacgacauuagcaagaucagcgagggaaucggcgacaaggugggcauguuuuuccaagcuguggcuaccuucuucgccggcuucaucguaggauucauuagaggauggaagcugacccuggugaucauggcuaucagcccaaucuugggccuguccgcugccgugugggccaaaauucugucugcguuuucagauaaggagcuggccgccuacgccaaggcaggcgcugucgccgaggaggcucugggcgccaucagaacugugaucgccuucgguggacagaacaaggaguuggaaagauaucagaagcacuuggagaacgccaaggagaucggcaucaagaaggccaucucugccaauaucagcaugggcaucgcguuucugcugauuuacgccagcuacgcacuggccuucugguauggcucuaccuuggucaucagcaaggaguacaccaucggcaacgcuaugacuguguucuucuccauucugaucggcgcauucagcgugggacaggccgccccuugcaucgacgcuuucgccaacgccaggggcgccgccuacgucaucuuugacauuaucgacaacaaccccaaaaucgacucuuucagcgaaagaggccacaaacccgacuccaucaaggguaaccuggaguucaacgauguccauuucuccuacccuucuagggccaacgugaagauccugaagggccuaaaucugaaggugcagucaggacagaccgucgcucugguggguagcuccggcugcggcaaguccaccacagugcagcuuauccagagguuguaugacccugaugaaggcaccauuaauaucgacggccaggacaucaggaauuuuaaugugaauuaccugagagagauuaucggcguggucagccaggagcccguccuauucagcacaacaauagccgaaaacaucuguuauggcagggggaacgucacaauggaugagaucaagaaggccgugaaagaggcuaacgcauacgaauuuaucaugaagcucccucagaaguucgacacuuuggugggcgagagaggcgcccaacugagcggcggccagaagcagagaaucgcaaucgcuagagcccucguccggaauccaaagauccugcugcucgacgaggccacaagcgcucuugacaccgagucagaggccgaggugcaagcugcccuggacaaagcccgggagggcagaaccaccaucgugauugcccacaggcuguccaccguuagaaaugcggacgucaucgccggguucgaggacggggugauuguggagcagggcagccauagcgagcucaugaagaaggagggaguguacuucaagcuggucaauaugcagaccaguggcucucagauccagagcgaggaguucgagcugaacgacgagaaggccgccacuagaauggcccccaauggcuggaaaagcagacucuucagacacagcacgcagaagaaccugaagaacagucagaugugccagaagagucuggacgucgagaccgacggccuggaggccaacgugccccccgucaguuuccugaaggugcugaaacuaaacaaaacugaguggccuuacuucguuguaggaaccgucugcgcuaucgccaacgggggacugcagcccgccuuuagcgugaucuuuagcgaaaucaucgccaucuuuggccccggcgacgacgcugugaagcagcagaagugcaauaucuucucuuugaucuuucuguuccugggcaucaucucauucuuuacauuuuuucuccagggcuucaccuucggcaaggccggagagauucugaccagaagacugagaagcauggccuucaaggcuaugcugaggcaggacaugagcugguuugacgaucacaagaacagcacuggcgcccugagcacaagacuggcuaccgacgccgcacaggugcagggcgccaccgggacuagguuggcucugaucgcccagaauaucgccaaucugggcacuggcauuauuauuagcuucaucuauggcuggcagcugacccugcugcugcuggccguugugcccaucaucgcugugucaggcaucguggaaaugaagcuccucgcuggcaacgccaaaagggacaagaaggagcuggaggccgcaggcaagauugccaccgaggccaucgagaauauccgcaccgucgugagcuugacccaggaaagaaaguucgagagcauguacguagagaaacuguacggacccuaccgcaauuccguacagaaggcucauaucuacgggaucacuuuuuccaucucccaggccuucauguacuuuagcuacgccggcugcuuuagauucggugccuacuugaucgugaacggacacaugcgauucagagaugugauucugguguuuagcgcuauuguguucggcgccgucgcccucgggcacgccagcagcuucgcccccgacuacgcgaaggcuaagcucucagcugcgcaccuguucaugcuguucgagcgccagccccucaucgacuccuacagcgaagagggauuaaagccggauaaauucgagggcaacaucaccuuuaacgaggugguauuuaacuauccaacccgcgccaacgugccgguucugcaaggacucagccuugaggucaagaagggccagacccuugcgcucgucggcuccagcggcugcggcaaaagcaccgucgugcagcugcuggagagauucuaugacccccuggccgggacugugcugcuggacggccaggaggcuaagaagcugaacgugcaguggcuccgggcucagcugggaaucgugagccaggaaccgauacuguuugacugcagcaucgcugagaacaucgccuauggagauaacagcaggguggugucccaggaugaaauugugagcgcugccaaagccgccaacauccacccuuucaucgagacucugccccauaaguacgagaccagagugggcgacaaagguacacagcuguccggagggcagaagcagagaauugccaucgccagggccuugauuagacagccgcagauccuucugcuggacgaggccacuucugcccuggacaccgaauccgagaagguugugcaggaagcccuggacaaggcaagagagggccguaccugcaucgugaucgcccacagacugagcacgauccagaacgcagaucugaucgucguguuccagaacggaagaguuaaagagcaugggacacaccagcagcuccuggcucagaagggcaucuauuucuccauggugagcgugcaggccggcacccagaaccuggacuacaaggacgacgacgacaaggacuacaaggacgacgacgacaag

SEQ ID NO: 37 - protein, 1295 aa, Artificial Sequence; identical to SEQ ID NO: 34
  Synthetic Polypeptide

SEQ ID NO: 38 - RNA, 4051 nt, Artificial Sequence
  Synthetic Polynucleotide
gggaaauaagagagaaaagaagaguaagaagaaauauaagagccaccauggauuuggaggccgcuaagaacggcacagccuggcgccccaccagcgccgagggcgacuucgagcugggcauuagcagcaagcagaagaggaaaaagacaaagaccgucaaaaugaucggagugcugacccuguuuagguacagugacuggcaggacaaacucuuuaugagccugggaaccaucauggccauugcccacggcagcggccucccccugaugaugauugucuuuggggagaugaccgauaaguuuguggauaccgccggcaacuucuccuuccccgucaacuucagccugagccugcugaaucccgguaagauucuggaagaggagaugacccgguacgccuacuauuacucaggcuugggugccggcguuuugguggccgcauacauccagguuucuuucuggacucuggcagccggucgccagauccggaaaaucagacagaaguucuuccacgccauccugagacaggagaucggaugguuugacaucaaugacaccacagaacugaacacuagacucaccgacgacaucucaaaaaucucugagggcaucggagauaaggugggcauguucuuccaggccguggccaccuuuuuugccggauucauugugggcuuuauaagaggcuggaaacugacacuggugauuauggccaucagccccauccugggucuuagcgccgccgucugggccaaaauccugagcgcuuuuagcgacaaggagcuugccgccuacgcuaaggccggggccguggccgaggaggcccugggggcaaucagaaccgugauagccuucgggggccagaauaaggagcuggaaagguaccagaagcaccucgagaaugcuaaggagaucggaaucaagaaggcgaucucagccaauaucuccauggguauugccuucuugcugauuuaugcuagcuacgcccuggccuucugguacggcagcacacucguuauuagcaaggaguacacaauuggaaacgcaaugaccguauucuucagcauucugaucggcgccuucagcgugggccaggcugccccuugcaucgaugccuucgcuaacgccaggggggccgccuacgucaucuucgacaucaucgauaacaauccuaaaaucgacaguuuuucugagagaggccauaaaccugacagcaucaagggcaaucuggaguucaacgacguccacuucagcuacccaucacgggccaaugucaaaauccugaagggccugaaccugaaggugcaauccggucagacaguugcccuggugggcucuagugggugcgggaagagcacuaccguccagcugauucagcggcuguacgaucccgaugagggaaccauuaacaucgacggccaggacauccggaacuucaacgugaauuaccugagagagaucauuggcguggugagucaggaaccaguccuguucucuaccacaauugccgaaaauauuugcuauggcagaggaaacgugaccauggacgaaauuaagaaggcuguuaaagaagcgaaugcuuacgaguucauuaugaagcugccccagaaguucgacacgcuggugggggaacguggggcccagcugagcggaggccaaaagcagcgcauagccaucgcuagggcccuggugcgcaaccccaagauccuccugcuggacgaggccacuucagcucuggauacugagagcgaagcugagguccaggcugcccuggacaaggcucgggaaggaagaacaaccaucguuaucgcccacaggcugagcacagugaggaacgcggacguuauugccggcuucgaggacggcgugaucguggagcagggcagccacagugagcugaugaagaaggaggguguauacuuuaagcuggugaauaugcagacgaguggaagccaaauacaguccgaggaguucgagcugaaugacgagaaggcugcaaccaggauggcccccaauggcuggaagagcagacucuucaggcacagcacucagaagaaccugaagaacucacagaugugucagaaaagcuuagauguugagaccgauggcuuggaggccaacgugccacccgugagcuuucugaaggugcugaaacugaacaagaccgaguggccuuacuucguugugggcaccgugugcgcuauugccaacggcggacugcagcccgccuucagugugauauucuccgagauaaucgcaaucuuuggccccggggacgaugcugugaagcagcagaagugcaacauuuucagccugauuuuccuguuccuggggaucauuaguuucuucaccuucuuccuccagggcuucaccuucgguaaggccggggagauccugaccagacggcugagaaguauggccuucaaagccaugcugaggcaggacaugaguugguucgacgaccacaagaauucuacuggggcccugagcaccaggcuugcuaccgacgccgcccaggugcagggcgccaccgguacaagacuggcccucauagcccagaacauagccaaccugggcacaggcaucaucauauccuucauuuacggauggcaguugacacugcugcugcuugccguuguccccaucaucgccgucaguggcaucgucgagaugaaacugcucgccggcaacgccaaacgggauaagaaggaacuggaggccgccggcaagauugcuacugaggcuaucgagaauauuagaaccgucgugucauugacccaggagagaaaguuugagagcauguacguggagaagcuguacggcccauauagaaauuccgugcagaaggcccacaucuauggcaucacauucucaauuucccaggccuucauguacuuuucuuaugccggcugcuuuagauucggcgccuacuugauugugaacggccacaugagguuuagggacgugauccuggucuuuagcgccaucguguucggcgccguggcccugggccacgccagcagcuucgccccggacuacgcuaaggccaaacuuagcgcagcccaccuguucaugcuguucgagcgacagccccugaucgacuccuauagcgaggagggacugaagccagauaaguucgaaggaaauaucaccuucaacgagguugucuuuaacuacccuaccagagccaacguucccgugcugcagggacugucccuugaggugaaaaagggccagacacuggcccuggugggcagcuccggcuguggcaaauccacaguggugcagcuccuggagagauucuacgacccucucgccgggacagugcugcuggauggccaggaagcuaaaaagcugaacguccaguggcugagggcccagcuggggauagugagccaggagcccauccucuuugacuguaguauagccgagaacaucgcauacggagacaacagcagaguggugucacaggacgaaaucgucucagccgcuaaagccgcuaauauucaccccuucaucgaaacuuuaccucauaaguacgagacaagagugggcgacaaggggacucaguuaagcggcggacagaagcagagaaucgcuaucgccagggcacucaucagacagccgcagauccuccuguuggacgaagccaccagcgcccuggauaccgaaagugagaaaguggugcaggaagcccuggacaaggccagagagggcaggaccuguaucgugaucgcacacaggcugagcaccauucagaacgccgaccugaucgugguguuucagaacggacgugugaaggagcacgguacucaucagcagcuguuggcccagaagggaaucuacuucucaaugguuaguguacaagccggcacccagaaucuggacuacaaggacgacgacgacaaggacuacaaggacgacgacgacaagugauaauaggcuggagccucgguggccaugcuucuugccccuugggccuccccccagccccuccuccccuuccugcacccguacccccguggucuuugaauaaagucugagugggcggc

SEQ ID NO: 39 - RNA, 3885 nt, Artificial Sequence
  Synthetic Polynucleotide
auggauuuggaggccgcuaagaacggcacagccuggcgccccaccagcgccgagggcgacuucgagcugggcauuagcagcaagcagaagaggaaaaagacaaagaccgucaaaaugaucggagugcugacccuguuuagguacagugacuggcaggacaaacucuuuaugagccugggaaccaucauggccauugcccacggcagcggccucccccugaugaugauugucuuuggggagaugaccgauaaguuuguggauaccgccggcaacuucuccuuccccgucaacuucagccugagccugcugaaucccgguaagauucuggaagaggagaugacccgguacgccuacuauuacucaggcuugggugccggcguuuugguggccgcauacauccagguuucuuucuggacucuggcagccggucgccagauccggaaaaucagacagaaguucuuccacgccauccugagacaggagaucggaugguuugacaucaaugacaccacagaacugaacacuagacucaccgacgacaucucaaaaaucucugagggcaucggagauaaggugggcauguucuuccaggccguggccaccuuuuuugccggauucauugugggcuuuauaagaggcuggaaacugacacuggugauuauggccaucagccccauccugggucuuagcgccgccgucugggccaaaauccugagcgcuuuuagcgacaaggagcuugccgccuacgcuaaggccggggccguggccgaggaggcccugggggcaaucagaaccgugauagccuucgggggccagaauaaggagcuggaaagguaccagaagcaccucgagaaugcuaaggagaucggaaucaagaaggcgaucucagccaauaucuccauggguauugccuucuugcugauuuaugcuagcuacgcccuggccuucugguacggcagcacacucguuauuagcaaggaguacacaauuggaaacgcaaugaccguauucuucagcauucugaucggcgccuucagcgugggccaggcugccccuugcaucgaugccuucgcuaacgccaggggggccgccuacgucaucuucgacaucaucgauaacaauccuaaaaucgacaguuuuucugagagaggccauaaaccugacagcaucaagggcaaucuggaguucaacgacguccacuucagcuacccaucacgggccaaugucaaaauccugaagggccugaaccugaaggugcaauccggucagacaguugcccuggugggcucuagugggugcgggaagagcacuaccguccagcugauucagcggcuguacgaucccgaugagggaaccauuaacaucgacggccaggacauccggaacuucaacgugaauuaccugagagagaucauuggcguggugagucaggaaccaguccuguucucuaccacaauugccgaaaauauuugcuauggcagaggaaacgugaccauggacgaaauuaagaaggcuguuaaagaagcgaaugcuuacgaguucauuaugaagcugccccagaaguucgacacgcuggugggggaacguggggcccagcugagcggaggccaaaagcagcgcauagccaucgcuagggcccuggugcgcaaccccaagauccuccugcuggacgaggccacuucagcucuggauacugagagcgaagcugagguccaggcugcccuggacaaggcucgggaaggaagaacaaccaucguuaucgcccacaggcugagcacagugaggaacgcggacguuauugccggcuucgaggacggcgugaucguggagcagggcagccacagugagcugaugaagaaggaggguguauacuuuaagcuggugaauaugcagacgaguggaagccaaauacaguccgaggaguucgagcugaaugacgagaaggcugcaaccaggauggcccccaauggcuggaagagcagacucuucaggcacagcacucagaagaaccugaagaacucacagaugugucagaaaagcuuagauguugagaccgauggcuuggaggccaacgugccacccgugagcuuucugaaggugcugaaacugaacaagaccgaguggccuuacuucguugugggcaccgugugcgcuauugccaacggcggacugcagcccgccuucagugugauauucuccgagauaaucgcaaucuuuggccccggggacgaugcugugaagcagcagaagugcaacauuuucagccugauuuuccuguuccuggggaucauuaguuucuucaccuucuuccuccagggcuucaccuucgguaaggccggggagauccugaccagacggcugagaaguauggccuucaaagccaugcugaggcaggacaugaguugguucgacgaccacaagaauucuacuggggcccugagcaccaggcuugcuaccgacgccgcccaggugcagggcgccaccgguacaagacuggcccucauagcccagaacauagccaaccugggcacaggcaucaucauauccuucauuuacggauggcaguugacacugcugcugcuugccguuguccccaucaucgccgucaguggcaucgucgagaugaaacugcucgccggcaacgccaaacgggauaagaaggaacuggaggccgccggcaagauugcuacugaggcuaucgagaauauuagaaccgucgugucauugacccaggagagaaaguuugagagcauguacguggagaagcuguacggcccauauagaaauuccgugcagaaggcccacaucuauggcaucacauucucaauuucccaggccuucauguacuuuucuuaugccggcugcuuuagauucggcgccuacuugauugugaacggccacaugagguuuagggacgugauccuggucuuuagcgccaucguguucggcgccguggcccugggccacgccagcagcuucgccccggacuacgcuaaggccaaacuuagcgcagcccaccuguucaugcuguucgagcgacagccccugaucgacuccuauagcgaggagggacugaagccagauaaguucgaaggaaauaucaccuucaacgagguugucuuuaacuacccuaccagagccaacguucccgugcugcagggacugucccuugaggugaaaaagggccagacacuggcccuggugggcagcuccggcuguggcaaauccacaguggugcagcuccuggagagauucuacgacccucucgccgggacagugcugcuggauggccaggaagcuaaaaagcugaacguccaguggcugagggcccagcuggggauagugagccaggagcccauccucuuugacuguaguauagccgagaacaucgcauacggagacaacagcagaguggugucacaggacgaaaucgucucagccgcuaaagccgcuaauauucaccccuucaucgaaacuuuaccucauaaguacgagacaagagugggcgacaaggggacucaguuaagcggcggacagaagcagagaaucgcuaucgccagggcacucaucagacagccgcagauccuccuguuggacgaagccaccagcgcccuggauaccgaaagugagaaaguggugcaggaagcccuggacaaggccagagagggcaggaccuguaucgugaucgcacacaggcugagcaccauucagaacgccgaccugaucgugguguuucagaacggacgugugaaggagcacgguacucaucagcagcuguuggcccagaagggaaucuacuucucaaugguuaguguacaagccggcacccagaaucuggacuacaaggacgacgacgacaaggacuacaaggacgacgacgacaag

SEQ ID NO: 40 - protein, 1295 aa, Artificial Sequence; identical to SEQ ID NO: 34
  Synthetic Polypeptide

SEQ ID NO: 41 - RNA, 4024 nt, Artificial Sequence
  Synthetic Polynucleotide
gggaaauaagagagaaaagaagaguaagaagaaauauaagagccaccauggaucuugaggcggcaaagaacggaacagccuggcgccccacgagcgcggagggcgacuuugaacugggcaucagcagcaaacaaaaaaggaaaaaaacgaagacagugaaaaugauuggaguauuaacauuguuucgauacuccgauuggcaggauaaauuguuuaugucgcuggguaccaucauggccauagcucacggaucaggucucccccucaugaugauaguauuuggagagaugacugacaaauuuguugauacugcaggaaacuucuccuuuccagugaacuuuuccuugucgcugcuaaauccaggcaaaauucuggaagaagaaaugacuagauaugcauauuacuacucaggauugggugcuggaguucuuguugcugccuauauacaaguuucauuuuggacuuuggcagcuggucgacagaucaggaaaauuaggcagaaguuuuuucaugcuauucuacgacaggaaauaggaugguuugacaucaacgacaccacugaacucaauacgcggcuaacagaugacaucuccaaaaucagugaaggaauuggugacaagguuggaauguucuuucaagcaguagccacguuuuuugcaggauucauagugggauucaucagaggauggaagcucacccuugugauaauggccaucagcccuauucuaggacucucugcagccguuugggcaaagauacucucggcauuuagugacaaagaacuagcugcuuaugcaaaagcaggcgccguggcagaagaggcucugggggccaucaggacugugauagcuuucgggggccagaacaaagagcuggaaagguaucagaaacauuuagaaaaugccaaagagauuggaauuaaaaaagcuauuucagcaaacauuuccauggguauugccuuccuguuaauauaugcaucauaugcacuggccuucugguauggauccacucuagucauaucaaaagaauauacuauuggaaaugcaaugacaguuuuuuuuucaauccuaauuggagcuuucaguguuggccaggcugccccauguauugaugcuuuugccaaugcaagaggagcagcauaugugaucuuugauauuauugauaauaauccuaaaauugacaguuuuucagagagaggacacaaaccagacagcaucaaagggaauuuggaguucaaugauguucacuuuucuuacccuucucgagcuaacgucaagaucuugaagggccucaaccugaaggugcagagugggcagacgguggcccugguuggaaguaguggcugugggaagagcacaacgguccagcugauacagaggcucuaugacccugaugagggcacaauuaacauugaugggcaggauauuaggaacuuuaauguaaacuaucugagggaaaucauugguguggugagucaggagccggugcuguuuuccaccacaauugcugaaaauauuuguuauggccguggaaauguaaccauggaugagauaaagaaagcugucaaagaggccaacgccuaugaguuuaucaugaaauuaccacagaaauuugacacccugguuggagagagaggggcccagcugaguggugggcagaagcagaggaucgccauugcacgugcccugguucgcaaccccaagauccuucugcuggaugaggccacgucagcauuggacacagaaagugaagcugagguacaggcagcucuggauaaggccagagaaggccggaccaccauugugauagcacaccgacugucuacgguccgaaaugcagaugucaucgcuggguuugaggauggaguaauuguggagcaaggaagccacagcgaacugaugaagaaggaagggguguacuucaaacuugucaacaugcagacaucaggaagccagauccagucagaagaauuugaacuaaaugaugaaaaggcugccacuagaauggccccaaauggcuggaaaucucgccuauuuaggcauucuacucagaaaaaccuuaaaaauucacaaaugugucagaagagccuugauguggaaaccgauggacuugaagcaaaugugccaccaguguccuuucugaagguccugaaacugaauaaaacagaauggcccuacuuugucgugggaacaguaugugccauugccaauggggggcuucagccggcauuuucagucauauucucagagaucauagcgauuuuuggaccaggcgaugaugcagugaagcagcagaagugcaacauauucucuuugauuuucuuauuucugggaauuauuucuuuuuuuacuuucuuccuucaggguuucacguuugggaaagcuggcgagauccucaccagaagacugcggucaauggcuuuuaaagcaaugcuaagacaggacaugagcugguuugaugaccauaaaaacaguacuggugcacuuucuacaagacuugccacagaugcugcccaaguccaaggagccacaggaaccagguuggcuuuaauugcacagaauauagcuaaccuuggaacugguauuaucauaucauuuaucuacgguuggcaguuaacccuauugcuauuagcaguuguuccaauuauugcugugucaggaauuguugaaaugaaauuguuggcuggaaaugccaaaagagauaaaaaagaacuggaagcugcuggaaagauugcaacagaggcaauagaaaauauuaggacaguugugucuuugacccaggaaagaaaauuugaaucaauguauguugaaaaauuguauggaccuuacaggaauucugugcagaaggcacacaucuauggaauuacuuuuaguaucucacaagcauuuauguauuuuuccuaugccgguuguuuucgauuuggugcauaucucauugugaauggacauaugcgcuucagagauguuauucugguguuuucugcaauuguauuuggugcaguggcucuaggacaugccaguucauuugcuccagacuaugcuaaagcuaagcugucugcagcccacuuauucaugcuguuugaaagacaaccucugauugacagcuacagugaagaggggcugaagccugauaaauuugaaggaaauauaacauuuaaugaagucguguucaacuaucccacccgagcaaacgugccagugcuucaggggcugagccuggaggugaagaaaggccagacacuagcccuggugggcagcaguggcugugggaagagcacggugguccagcuccuggagcgguucuacgaccccuuggcggggacaguguuuguggacuuugguuuucagcuucucgauggucaagaagcaaagaaacucaauguccaguggcucagagcucaacucggaaucgugucucaggagccuauccuauuugacugcagcauugccgagaauauugccuauggagacaacagccggguuguaucacaggaugaaauugugagugcagccaaagcugccaacauacauccuuucaucgagacguuaccccacaaauaugaaacaagagugggagauaaggggacucagcucucaggaggucaaaaacagaggauugcuauugcccgagcccucaucagacaaccucaaauccuccuguuggaugaagcuacaucagcucuggauacugaaagugaaaagguuguccaagaagcccuggacaaagccagagaaggccgcaccugcauugugauugcucaccgccuguccaccauccagaaugcagacuuaauagugguguuucagaaugggagagucaaggagcauggcacgcaucagcagcugcuggcacagaaaggcaucuauuuuucaauggucaguguccaggcugggacacagaacuuaugauaauaggcuggagccucgguggccaugcuucuugccccuugggccuccccccagccccuccuccccuuccugcacccguacccccguggucuuugaauaaagucugagugggcggc

SEQ ID NO: 42 - RNA, 3858 nt, Artificial Sequence
  Synthetic Polynucleotide
auggaucuugaggcggcaaagaacggaacagccuggcgccccacgagcgcggagggcgacuuugaacugggcaucagcagcaaacaaaaaaggaaaaaaacgaagacagugaaaaugauuggaguauuaacauuguuucgauacuccgauuggcaggauaaauuguuuaugucgcuggguaccaucauggccauagcucacggaucaggucucccccucaugaugauaguauuuggagagaugacugacaaauuuguugauacugcaggaaacuucuccuuuccagugaacuuuuccuugucgcugcuaaauccaggcaaaauucuggaagaagaaaugacuagauaugcauauuacuacucaggauugggugcuggaguucuuguugcugccuauauacaaguuucauuuuggacuuuggcagcuggucgacagaucaggaaaauuaggcagaaguuuuuucaugcuauucuacgacaggaaauaggaugguuugacaucaacgacaccacugaacucaauacgcggcuaacagaugacaucuccaaaaucagugaaggaauuggugacaagguuggaauguucuuucaagcaguagccacguuuuuugcaggauucauagugggauucaucagaggauggaagcucacccuugugauaauggccaucagcccuauucuaggacucucugcagccguuugggcaaagauacucucggcauuuagugacaaagaacuagcugcuuaugcaaaagcaggcgccguggcagaagaggcucugggggccaucaggacugugauagcuuucgggggccagaacaaagagcuggaaagguaucagaaacauuuagaaaaugccaaagagauuggaauuaaaaaagcuauuucagcaaacauuuccauggguauugccuuccuguuaauauaugcaucauaugcacuggccuucugguauggauccacucuagucauaucaaaagaauauacuauuggaaaugcaaugacaguuuuuuuuucaauccuaauuggagcuuucaguguuggccaggcugccccauguauugaugcuuuugccaaugcaagaggagcagcauaugugaucuuugauauuauugauaauaauccuaaaauugacaguuuuucagagagaggacacaaaccagacagcaucaaagggaauuuggaguucaaugauguucacuuuucuuacccuucucgagcuaacgucaagaucuugaagggccucaaccugaaggugcagagugggcagacgguggcccugguuggaaguaguggcugugggaagagcacaacgguccagcugauacagaggcucuaugacccugaugagggcacaauuaacauugaugggcaggauauuaggaacuuuaauguaaacuaucugagggaaaucauugguguggugagucaggagccggugcuguuuuccaccacaauugcugaaaauauuuguuauggccguggaaauguaaccauggaugagauaaagaaagcugucaaagaggccaacgccuaugaguuuaucaugaaauuaccacagaaauuugacacccugguuggagagagaggggcccagcugaguggugggcagaagcagaggaucgccauugcacgugcccugguucgcaaccccaagauccuucugcuggaugaggccacgucagcauuggacacagaaagugaagcugagguacaggcagcucuggauaaggccagagaaggccggaccaccauugugauagcacaccgacugucuacgguccgaaaugcagaugucaucgcuggguuugaggauggaguaauuguggagcaaggaagccacagcgaacugaugaagaaggaagggguguacuucaaacuugucaacaugcagacaucaggaagccagauccagucagaagaauuugaacuaaaugaugaaaaggcugccacuagaauggccccaaauggcuggaaaucucgccuauuuaggcauucuacucagaaaaaccuuaaaaauucacaaaugugucagaagagccuugauguggaaaccgauggacuugaagcaaaugugccaccaguguccuuucugaagguccugaaacugaauaaaacagaauggcccuacuuugucgugggaacaguaugugccauugccaauggggggcuucagccggcauuuucagucauauucucagagaucauagcgauuuuuggaccaggcgaugaugcagugaagcagcagaagugcaacauauucucuuugauuuucuuauuucugggaauuauuucuuuuuuuacuuucuuccuucaggguuucacguuugggaaagcuggcgagauccucaccagaagacugcggucaauggcuuuuaaagcaaugcuaagacaggacaugagcugguuugaugaccauaaaaacaguacuggugcacuuucuacaagacuugccacagaugcugcccaaguccaaggagccacaggaaccagguuggcuuuaauugcacagaauauagcuaaccuuggaacugguauuaucauaucauuuaucuacgguuggcaguuaacccuauugcuauuagcaguuguuccaauuauugcugugucaggaauuguugaaaugaaauuguuggcuggaaaugccaaaagagauaaaaaagaacuggaagcugcuggaaagauugcaacagaggcaauagaaaauauuaggacaguugugucuuugacccaggaaagaaaauuugaaucaauguauguugaaaaauuguauggaccuuacaggaauucugugcagaaggcacacaucuauggaauuacuuuuaguaucucacaagcauuuauguauuuuuccuaugccgguuguuuucgauuuggugcauaucucauugugaauggacauaugcgcuucagagauguuauucugguguuuucugcaauuguauuuggugcaguggcucuaggacaugccaguucauuugcuccagacuaugcuaaagcuaagcugucugcagcccacuuauucaugcuguuugaaagacaaccucugauugacagcuacagugaagaggggcugaagccugauaaauuugaaggaaauauaacauuuaaugaagucguguucaacuaucccacccgagcaaacgugccagugcuucaggggcugagccuggaggugaagaaaggccagacacuagcccuggugggcagcaguggcugugggaagagcacggugguccagcuccuggagcgguucuacgaccccuuggcggggacaguguuuguggacuuugguuuucagcuucucgauggucaagaagcaaagaaacucaauguccaguggcucagagcucaacucggaaucgugucucaggagccuauccuauuugacugcagcauugccgagaauauugccuauggagacaacagccggguuguaucacaggaugaaauugugagugcagccaaagcugccaacauacauccuuucaucgagacguuaccccacaaauaugaaacaagagugggagauaaggggacucagcucucaggaggucaaaaacagaggauugcuauugcccgagcccucaucagacaaccucaaauccuccuguuggaugaagcuacaucagcucuggauacugaaagugaaaagguuguccaagaagcccuggacaaagccagagaaggccgcaccugcauugugauugcucaccgccuguccaccauccagaaugcagacuuaauagugguguuucagaaugggagagucaaggagcauggcacgcaucagcagcugcuggcacagaaaggcaucuauuuuucaauggucaguguccaggcugggacacagaacuua

SEQ ID NO: 43 - protein, 1286 aa, Artificial Sequence; identical to SEQ ID NO: 1
  Synthetic Polypeptide

SEQ ID NO: 44 - RNA, 4048 nt, Artificial Sequence
  Synthetic Polynucleotide
gggaaauaagagagaaaagaagaguaagaagaaauauaagagccaccauggaucuugaggcggcaaagaacggaacagccuggcgccccacgagcgcggagggcgacuuugaacugggcaucagcagcaaacaaaaaaggaaaaaaacgaagacagugaaaaugauuggaguauuaacauuguuucgauacuccgauuggcaggauaaauuguuuaugucgcuggguaccaucauggccauagcucacggaucaggucucccccucaugaugauaguauuuggagagaugacugacaaauuuguugauacugcaggaaacuucuccuuuccagugaacuuuuccuugucgcugcuaaauccaggcaaaauucuggaagaagaaaugacuagauaugcauauuacuacucaggauugggugcuggaguucuuguugcugccuauauacaaguuucauuuuggacuuuggcagcuggucgacagaucaggaaaauuaggcagaaguuuuuucaugcuauucuacgacaggaaauaggaugguuugacaucaacgacaccacugaacucaauacgcggcuaacagaugacaucuccaaaaucagugaaggaauuggugacaagguuggaauguucuuucaagcaguagccacguuuuuugcaggauucauagugggauucaucagaggauggaagcucacccuugugauaauggccaucagcccuauucuaggacucucugcagccguuugggcaaagauacucucggcauuuagugacaaagaacuagcugcuuaugcaaaagcaggcgccguggcagaagaggcucugggggccaucaggacugugauagcuuucgggggccagaacaaagagcuggaaagguaucagaaacauuuagaaaaugccaaagagauuggaauuaaaaaagcuauuucagcaaacauuuccauggguauugccuuccuguuaauauaugcaucauaugcacuggccuucugguauggauccacucuagucauaucaaaagaauauacuauuggaaaugcaaugacaguuuuuuuuucaauccuaauuggagcuuucaguguuggccaggcugccccauguauugaugcuuuugccaaugcaagaggagcagcauaugugaucuuugauauuauugauaauaauccuaaaauugacaguuuuucagagagaggacacaaaccagacagcaucaaagggaauuuggaguucaaugauguucacuuuucuuacccuucucgagcuaacgucaagaucuugaagggccucaaccugaaggugcagagugggcagacgguggcccugguuggaaguaguggcugugggaagagcacaacgguccagcugauacagaggcucuaugacccugaugagggcacaauuaacauugaugggcaggauauuaggaacuuuaauguaaacuaucugagggaaaucauugguguggugagucaggagccggugcuguuuuccaccacaauugcugaaaauauuuguuauggccguggaaauguaaccauggaugagauaaagaaagcugucaaagaggccaacgccuaugaguuuaucaugaaauuaccacagaaauuugacacccugguuggagagagaggggcccagcugaguggugggcagaagcagaggaucgccauugcacgugcccugguucgcaaccccaagauccuucugcuggaugaggccacgucagcauuggacacagaaagugaagcugagguacaggcagcucuggauaaggccagagaaggccggaccaccauugugauagcacaccgacugucuacgguccgaaaugcagaugucaucgcuggguuugaggauggaguaauuguggagcaaggaagccacagcgaacugaugaagaaggaagggguguacuucaaacuugucaacaugcagacaucaggaagccagauccagucagaagaauuugaacuaaaugaugaaaaggcugccacuagaauggccccaaauggcuggaaaucucgccuauuuaggcauucuacucagaaaaaccuuaaaaauucacaaaugugucagaagagccuugauguggaaaccgauggacuugaagcaaaugugccaccaguguccuuucugaagguccugaaacugaauaaaacagaauggcccuacuuugucgugggaacaguaugugccauugccaauggggggcuucagccggcauuuucagucauauucucagagaucauagcgauuuuuggaccaggcgaugaugcagugaagcagcagaagugcaacauauucucuuugauuuucuuauuucugggaauuauuucuuuuuuuacuuucuuccuucaggguuucacguuugggaaagcuggcgagauccucaccagaagacugcggucaauggcuuuuaaagcaaugcuaagacaggacaugagcugguuugaugaccauaaaaacaguacuggugcacuuucuacaagacuugccacagaugcugcccaaguccaaggagccacaggaaccagguuggcuuuaauugcacagaauauagcuaaccuuggaacugguauuaucauaucauuuaucuacgguuggcaguuaacccuauugcuauuagcaguuguuccaauuauugcugugucaggaauuguugaaaugaaauuguuggcuggaaaugccaaaagagauaaaaaagaacuggaagcugcuggaaagauugcaacagaggcaauagaaaauauuaggacaguugugucuuugacccaggaaagaaaauuugaaucaauguauguugaaaaauuguauggaccuuacaggaauucugugcagaaggcacacaucuauggaauuacuuuuaguaucucacaagcauuuauguauuuuuccuaugccgguuguuuucgauuuggugcauaucucauugugaauggacauaugcgcuucagagauguuauucugguguuuucugcaauuguauuuggugcaguggcucuaggacaugccaguucauuugcuccagacuaugcuaaagcuaagcugucugcagcccacuuauucaugcuguuugaaagacaaccucugauugacagcuacagugaagaggggcugaagccugauaaauuugaaggaaauauaacauuuaaugaagucguguucaacuaucccacccgagcaaacgugccagugcuucaggggcugagccuggaggugaagaaaggccagacacuagcccuggugggcagcaguggcugugggaagagcacggugguccagcuccuggagcgguucuacgaccccuuggcggggacaguguuuguggacuuugguuuucagcuucucgauggucaagaagcaaagaaacucaauguccaguggcucagagcucaacucggaaucgugucucaggagccuauccuauuugacugcagcauugccgagaauauugccuauggagacaacagccggguuguaucacaggaugaaauugugagugcagccaaagcugccaacauacauccuuucaucgagacguuaccccacaaauaugaaacaagagugggagauaaggggacucagcucucaggaggucaaaaacagaggauugcuauugcccgagcccucaucagacaaccucaaauccuccuguuggaugaagcuacaucagcucuggauacugaaagugaaaagguuguccaagaagcccuggacaaagccagagaaggccgcaccugcauugugauugcucaccgccuguccaccauccagaaugcagacuuaauagugguguuucagaaugggagagucaaggagcauggcacgcaucagcagcugcuggcacagaaaggcaucuauuuuucaauggucaguguccaggcugggacacagaacuuagauuacaaggaugacgacgauaagugauaauaggcuggagccucgguggccaugcuucuugccccuugggccuccccccagccccuccuccccuuccugcacccguacccccguggucuuugaauaaagucugagugggcggc

SEQ ID NO: 45 - RNA, 3882 nt, Artificial Sequence
  Synthetic Polynucleotide
auggaucuugaggcggcaaagaacggaacagccuggcgccccacgagcgcggagggcgacuuugaacugggcaucagcagcaaacaaaaaaggaaaaaaacgaagacagugaaaaugauuggaguauuaacauuguuucgauacuccgauuggcaggauaaauuguuuaugucgcuggguaccaucauggccauagcucacggaucaggucucccccucaugaugauaguauuuggagagaugacugacaaauuuguugauacugcaggaaacuucuccuuuccagugaacuuuuccuugucgcugcuaaauccaggcaaaauucuggaagaagaaaugacuagauaugcauauuacuacucaggauugggugcuggaguucuuguugcugccuauauacaaguuucauuuuggacuuuggcagcuggucgacagaucaggaaaauuaggcagaaguuuuuucaugcuauucuacgacaggaaauaggaugguuugacaucaacgacaccacugaacucaauacgcggcuaacagaugacaucuccaaaaucagugaaggaauuggugacaagguuggaauguucuuucaagcaguagccacguuuuuugcaggauucauagugggauucaucagaggauggaagcucacccuugugauaauggccaucagcccuauucuaggacucucugcagccguuugggcaaagauacucucggcauuuagugacaaagaacuagcugcuuaugcaaaagcaggcgccguggcagaagaggcucugggggccaucaggacugugauagcuuucgggggccagaacaaagagcuggaaagguaucagaaacauuuagaaaaugccaaagagauuggaauuaaaaaagcuauuucagcaaacauuuccauggguauugccuuccuguuaauauaugcaucauaugcacuggccuucugguauggauccacucuagucauaucaaaagaauauacuauuggaaaugcaaugacaguuuuuuuuucaauccuaauuggagcuuucaguguuggccaggcugccccauguauugaugcuuuugccaaugcaagaggagcagcauaugugaucuuugauauuauugauaauaauccuaaaauugacaguuuuucagagagaggacacaaaccagacagcaucaaagggaauuuggaguucaaugauguucacuuuucuuacccuucucgagcuaacgucaagaucuugaagggccucaaccugaaggugcagagugggcagacgguggcccugguuggaaguaguggcugugggaagagcacaacgguccagcugauacagaggcucuaugacccugaugagggcacaauuaacauugaugggcaggauauuaggaacuuuaauguaaacuaucugagggaaaucauugguguggugagucaggagccggugcuguuuuccaccacaauugcugaaaauauuuguuauggccguggaaauguaaccauggaugagauaaagaaagcugucaaagaggccaacgccuaugaguuuaucaugaaauuaccacagaaauuugacacccugguuggagagagaggggcccagcugaguggugggcagaagcagaggaucgccauugcacgugcccugguucgcaaccccaagauccuucugcuggaugaggccacgucagcauuggacacagaaagugaagcugagguacaggcagcucuggauaaggccagagaaggccggaccaccauugugauagcacaccgacugucuacgguccgaaaugcagaugucaucgcuggguuugaggauggaguaauuguggagcaaggaagccacagcgaacugaugaagaaggaagggguguacuucaaacuugucaacaugcagacaucaggaagccagauccagucagaagaauuugaacuaaaugaugaaaaggcugccacuagaauggccccaaauggcuggaaaucucgccuauuuaggcauucuacucagaaaaaccuuaaaaauucacaaaugugucagaagagccuugauguggaaaccgauggacuugaagcaaaugugccaccaguguccuuucugaagguccugaaacugaauaaaacagaauggcccuacuuugucgugggaacaguaugugccauugccaauggggggcuucagccggcauuuucagucauauucucagagaucauagcgauuuuuggaccaggcgaugaugcagugaagcagcagaagugcaacauauucucuuugauuuucuuauuucugggaauuauuucuuuuuuuacuuucuuccuucaggguuucacguuugggaaagcuggcgagauccucaccagaagacugcggucaauggcuuuuaaagcaaugcuaagacaggacaugagcugguuugaugaccauaaaaacaguacuggugcacuuucuacaagacuugccacagaugcugcccaaguccaaggagccacaggaaccagguuggcuuuaauugcacagaauauagcuaaccuuggaacugguauuaucauaucauuuaucuacgguuggcaguuaacccuauugcuauuagcaguuguuccaauuauugcugugucaggaauuguugaaaugaaauuguuggcuggaaaugccaaaagagauaaaaaagaacuggaagcugcuggaaagauugcaacagaggcaauagaaaauauuaggacaguugugucuuugacccaggaaagaaaauuugaaucaauguauguugaaaaauuguauggaccuuacaggaauucugugcagaaggcacacaucuauggaauuacuuuuaguaucucacaagcauuuauguauuuuuccuaugccgguuguuuucgauuuggugcauaucucauugugaauggacauaugcgcuucagagauguuauucugguguuuucugcaauuguauuuggugcaguggcucuaggacaugccaguucauuugcuccagacuaugcuaaagcuaagcugucugcagcccacuuauucaugcuguuugaaagacaaccucugauugacagcuacagugaagaggggcugaagccugauaaauuugaaggaaauauaacauuuaaugaagucguguucaacuaucccacccgagcaaacgugccagugcuucaggggcugagccuggaggugaagaaaggccagacacuagcccuggugggcagcaguggcugugggaagagcacggugguccagcuccuggagcgguucuacgaccccuuggcggggacaguguuuguggacuuugguuuucagcuucucgauggucaagaagcaaagaaacucaauguccaguggcucagagcucaacucggaaucgugucucaggagccuauccuauuugacugcagcauugccgagaauauugccuauggagacaacagccggguuguaucacaggaugaaauugugagugcagccaaagcugccaacauacauccuuucaucgagacguuaccccacaaauaugaaacaagagugggagauaaggggacucagcucucaggaggucaaaaacagaggauugcuauugcccgagcccucaucagacaaccucaaauccuccuguuggaugaagcuacaucagcucuggauacugaaagugaaaagguuguccaagaagcccuggacaaagccagagaaggccgcaccugcauugugauugcucaccgccuguccaccauccagaaugcagacuuaauagugguguuucagaaugggagagucaaggagcauggcacgcaucagcagcugcuggcacagaaaggcaucuauuuuucaauggucaguguccaggcugggacacagaacuuagauuacaaggaugacgacgauaag

SEQ ID NO: 46 - protein, 1294 aa, Artificial Sequence
  Synthetic Polypeptide
MDLEAAKNGTAWRPTSAEGDFELGISSKQKRKKTKTVKMIGVLTLFRYSDWQDKLFMSLGTIMAIAHGSGLPLMMIVFGEMTDKFVDTAGNFSFPVNFSLSLLNPGKILEEEMTRYAYYYSGLGAGVLVAAYIQVSFWTLAAGRQIRKIRQKFFHAILRQEIGWFDINDTTELNTRLTDDISKISEGIGDKVGMFFQAVATFFAGFIVGFIRGWKLTLVIMAISPILGLSAAVWAKILSAFSDKELAAYAKAGAVAEEALGAIRTVIAFGGQNKELERYQKHLENAKEIGIKKAISANISMGIAFLLIYASYALAFWYGSTLVISKEYTIGNAMTVFFSILIGAFSVGQAAPCIDAFANARGAAYVIFDIIDNNPKIDSFSERGHKPDSIKGNLEFNDVHFSYPSRANVKILKGLNLKVQSGQTVALVGSSGCGKSTTVQLIQRLYDPDEGTINIDGQDIRNFNVNYLREIIGVVSQEPVLFSTTIAENICYGRGNVTMDEIKKAVKEANAYEFIMKLPQKFDTLVGERGAQLSGGQKQRIAIARALVRNPKILLLDEATSALDTESEAEVQAALDKAREGRTTIVIAHRLSTVRNADVIAGFEDGVIVEQGSHSELMKKEGVYFKLVNMQTSGSQIQSEEFELNDEKAATRMAPNGWKSRLFRHSTQKNLKNSQMCQKSLDVETDGLEANVPPVSFLKVLKLNKTEWPYFVVGTVCAIANGGLQPAFSVIFSEIIAIFGPGDDAVKQQKCNIFSLIFLFLGIISFFTFFLQGFTFGKAGEILTRRLRSMAFKAMLRQDMSWFDDHKNSTGALSTRLATDAAQVQGATGTRLALIAQNIANLGTGIIISFIYGWQLTLLLLAVVPIIAVSGIVEMKLLAGNAKRDKKELEAAGKIATEAIENIRTVVSLTQERKFESMYVEKLYGPYRNSVQKAHIYGITFSISQAFMYFSYAGCFRFGAYLIVNGHMRFRDVILVFSAIVFGAVALGHASSFAPDYAKAKLSAAHLFMLFERQPLIDSYSEEGLKPDKFEGNITFNEVVFNYPTRANVPVLQGLSLEVKKGQTLALVGSSGCGKSTVVQLLERFYDPLAGTVFVDFGFQLLDGQEAKKLNVQWLRAQLGIVSQEPILFDCSIAENIAYGDNSRVVSQDEIVSAAKAANIHPFIETLPHKYETRVGDKGTQLSGGQKQRIAIARALIRQPQILLLDEATSALDTESEKVVQEALDKAREGRTCIVIAHRLSTIQNADLIVVFQNGRVKEHGTHQQLLAQKGIYFSMVSVQAGTQNLDYKDDDDK

SEQ ID NO: 47 - RNA, 4027 nt, Artificial Sequence
  Synthetic Polynucleotide
gggaaauaagagagaaaagaagaguaagaagaaauauaagagccaccauggaucuugaggcggcaaagaacggaacagccuggcgccccacgagcgcggagggcgacuuugaacugggcaucagcagcaaacaaaaaaggaaaaaaacgaagacagugaaaaugauuggaguauuaacauuguuucgauacuccgauuggcaggauaaauuguuuaugucgcuggguaccaucauggccauagcucacggaucaggucucccccucaugaugauaguauuuggagagaugacugacaaauuuguugauacugcaggaaacuucuccuuuccagugaacuuuuccuugucgcugcuaaauccaggcaaaauucuggaagaagaaaugacuagauaugcauauuacuacucaggauugggugcuggaguucuuguugcugccuauauacaaguuucauuuuggacuuuggcagcuggucgacagaucaggaaaauuaggcagaaguuuuuucaugcuauucuacgacaggaaauaggaugguuugacaucaacgacaccacugaacucaauacgcggcuaacagaugacaucuccaaaaucagugaaggaauuggugacaagguuggaauguucuuucaagcaguagccacguuuuuugcaggauucauagugggauucaucagaggauggaagcucacccuugugauaauggccaucagcccuauucuaggacucucugcagccguuugggcaaagauacucucggcauuuagugacaaagaacuagcugcuuaugcaaaagcaggcgccguggcagaagaggcucugggggccaucaggacugugauagcuuucgggggccagaacaaagagcuggaaagguaucagaaacauuuagaaaaugccaaagagauuggaauuaaaaaagcuauuucagcaaacauuuccauggguauugccuuccuguuaauauaugcaucauaugcacuggccuucugguauggauccacucuagucauaucaaaagaauauacuauuggaaaugcaaugacaguuuuuuuuucaauccuaauuggagcuuucaguguuggccaggcugccccauguauugaugcuuuugccaaugcaagaggagcagcauaugugaucuuugauauuauugauaauaauccuaaaauugacaguuuuucagagagaggacacaaaccagacagcaucaaagggaauuuggaguucaaugauguucacuuuucuuacccuucucgagcuaacgucaagaucuugaagggccucaaccugaaggugcagagugggcagacgguggcccugguuggaaguaguggcugugggaagagcacaacgguccagcugauacagaggcucuaugacccugaugagggcacaauuaacauugaugggcaggauauuaggaacuuuaauguaaacuaucugagggaaaucauugguguggugagucaggagccggugcuguuuuccaccacaauugcugaaaauauuuguuauggccguggaaauguaaccauggaugagauaaagaaagcugucaaagaggccaacgccuaugaguuuaucaugaaauuaccacagaaauuugacacccugguuggagagagaggggcccagcugaguggugggcagaagcagaggaucgccauugcacgugcccugguucgcaaccccaagauccuucugcuggaugaggccacgucagcauuggacacagaaagugaagcugagguacaggcagcucuggauaaggccagagaaggccggaccaccauugugauagcacaccgacugucuacgguccgaaaugcagaugucaucgcuggguuugaggauggaguaauuguggagcaaggaagccacagcgaacugaugaagaaggaagggguguacuucaaacuugucaacaugcagacaucaggaagccagauccagucagaagaauuugaacuaaaugaugaaaaggcugccacuagaauggccccaaauggcuggaaaucucgccuauuuaggcauucuacucagaaaaaccuuaaaaauucacaaaugugucagaagagccuugauguggaaaccgauggacuugaagcaaaugugccaccaguguccuuucugaagguccugaaacugaauaaaacagaauggcccuacuuugucgugggaacaguaugugccauugccaauggggggcuucagccggcauuuucagucauauucucagagaucauagcgauuuuuggaccaggcgaugaugcagugaagcagcagaagugcaacauauucucuuugauuuucuuauuucugggaauuauuucuuuuuuuacuuucuuccuucaggguuucacguuugggaaagcuggcgagauccucaccagaagacugcggucaauggcuuuuaaagcaaugcuaagacaggacaugagcugguuugaugaccauaaaaacaguacuggugcacuuucuacaagacuugccacagaugcugcccaaguccaaggagccacaggaaccagguuggcuuuaauugcacagaauauagcuaaccuuggaacugguauuaucauaucauuuaucuacgguuggcaguuaacccuauugcuauuagcaguuguuccaauuauugcugugucaggaauuguugaaaugaaauuguuggcuggaaaugccaaaagagauaaaaaagaacuggaagcugcuggaaagauugcaacagaggcaauagaaaauauuaggacaguugugucuuugacccaggaaagaaaauuugaaucaauguauguugaaaaauuguauggaccuuacaggaauucugugcagaaggcacacaucuauggaauuacuuuuaguaucucacaagcauuuauguauuuuuccuaugccgguuguuuucgauuuggugcauaucucauugugaauggacauaugcgcuucagagauguuauucugguguuuucugcaauuguauuuggugcaguggcucuaggacaugccaguucauuugcuccagacuaugcuaaagcuaagcugucugcagcccacuuauucaugcuguuugaaagacaaccucugauugacagcuacagugaagaggggcugaagccugauaaauuugaaggaaauauaacauuuaaugaagucguguucaacuaucccacccgagcaaacgugccagugcuucaggggcugagccuggaggugaagaaaggccagacacuagcccuggugggcagcaguggcugugggaagagcacggugguccagcuccuggagcgguucuacgaccccuuggcggggacagugcuucucgauggucaagaagcaaagaaacucaauguccaguggcucagagcucaacucggaaucgugucucaggagccuauccuauuugacugcagcauugccgagaauauugccuauggagacaacagccggguuguaucacaggaugaaauugugagugcagccaaagcugccaacauacauccuuucaucgagacguuaccccacaaauaugaaacaagagugggagauaaggggacucagcucucaggaggucaaaaacagaggauugcuauugcccgagcccucaucagacaaccucaaauccuccuguuggaugaagcuacaucagcucuggauacugaaagugaaaagguuguccaagaagcccuggacaaagccagagaaggccgcaccugcauugugauugcucaccgccuguccaccauccagaaugcagacuuaauagugguguuucagaaugggagagucaaggagcauggcacgcaucagcagcugcuggcacagaaaggcaucuauuuuucaauggucaguguccaggcugggacacagaacuuagauuacaaggaugacgacgauaagugauaauaggcuggagccucgguggccaugcuucuugccccuugggccuccccccagccccuccuccccuuccugcacccguacccccguggucuuugaauaaagucugagugggcggc

SEQ ID NO: 48 - RNA, 3861 nt, Artificial Sequence
  Synthetic Polynucleotide
auggaucuugaggcggcaaagaacggaacagccuggcgccccacgagcgcggagggcgacuuugaacugggcaucagcagcaaacaaaaaaggaaaaaaacgaagacagugaaaaugauuggaguauuaacauuguuucgauacuccgauuggcaggauaaauuguuuaugucgcuggguaccaucauggccauagcucacggaucaggucucccccucaugaugauaguauuuggagagaugacugacaaauuuguugauacugcaggaaacuucuccuuuccagugaacuuuuccuugucgcugcuaaauccaggcaaaauucuggaagaagaaaugacuagauaugcauauuacuacucaggauugggugcuggaguucuuguugcugccuauauacaaguuucauuuuggacuuuggcagcuggucgacagaucaggaaaauuaggcagaaguuuuuucaugcuauucuacgacaggaaauaggaugguuugacaucaacgacaccacugaacucaauacgcggcuaacagaugacaucuccaaaaucagugaaggaauuggugacaagguuggaauguucuuucaagcaguagccacguuuuuugcaggauucauagugggauucaucagaggauggaagcucacccuugugauaauggccaucagcccuauucuaggacucucugcagccguuugggcaaagauacucucggcauuuagugacaaagaacuagcugcuuaugcaaaagcaggcgccguggcagaagaggcucugggggccaucaggacugugauagcuuucgggggccagaacaaagagcuggaaagguaucagaaacauuuagaaaaugccaaagagauuggaauuaaaaaagcuauuucagcaaacauuuccauggguauugccuuccuguuaauauaugcaucauaugcacuggccuucugguauggauccacucuagucauaucaaaagaauauacuauuggaaaugcaaugacaguuuuuuuuucaauccuaauuggagcuuucaguguuggccaggcugccccauguauugaugcuuuugccaaugcaagaggagcagcauaugugaucuuugauauuauugauaauaauccuaaaauugacaguuuuucagagagaggacacaaaccagacagcaucaaagggaauuuggaguucaaugauguucacuuuucuuacccuucucgagcuaacgucaagaucuugaagggccucaaccugaaggugcagagugggcagacgguggcccugguuggaaguaguggcugugggaagagcacaacgguccagcugauacagaggcucuaugacccugaugagggcacaauuaacauugaugggcaggauauuaggaacuuuaauguaaacuaucugagggaaaucauugguguggugagucaggagccggugcuguuuuccaccacaauugcugaaaauauuuguuauggccguggaaauguaaccauggaugagauaaagaaagcugucaaagaggccaacgccuaugaguuuaucaugaaauuaccacagaaauuugacacccugguuggagagagaggggcccagcugaguggugggcagaagcagaggaucgccauugcacgugcccugguucgcaaccccaagauccuucugcuggaugaggccacgucagcauuggacacagaaagugaagcugagguacaggcagcucuggauaaggccagagaaggccggaccaccauugugauagcacaccgacugucuacgguccgaaaugcagaugucaucgcuggguuugaggauggaguaauuguggagcaaggaagccacagcgaacugaugaagaaggaagggguguacuucaaacuugucaacaugcagacaucaggaagccagauccagucagaagaauuugaacuaaaugaugaaaaggcugccacuagaauggccccaaauggcuggaaaucucgccuauuuaggcauucuacucagaaaaaccuuaaaaauucacaaaugugucagaagagccuugauguggaaaccgauggacuugaagcaaaugugccaccaguguccuuucugaagguccugaaacugaauaaaacagaauggcccuacuuugucgugggaacaguaugugccauugccaauggggggcuucagccggcauuuucagucauauucucagagaucauagcgauuuuuggaccaggcgaugaugcagugaagcagcagaagugcaacauauucucuuugauuuucuuauuucugggaauuauuucuuuuuuuacuuucuuccuucaggguuucacguuugggaaagcuggcgagauccucaccagaagacugcggucaauggcuuuuaaagcaaugcuaagacaggacaugagcugguuugaugaccauaaaaacaguacuggugcacuuucuacaagacuugccacagaugcugcccaaguccaaggagccacaggaaccagguuggcuuuaauugcacagaauauagcuaaccuuggaacugguauuaucauaucauuuaucuacgguuggcaguuaacccuauugcuauuagcaguuguuccaauuauugcugugucaggaauuguugaaaugaaauuguuggcuggaaaugccaaaagagauaaaaaagaacuggaagcugcuggaaagauugcaacagaggcaauagaaaauauuaggacaguugugucuuugacccaggaaagaaaauuugaaucaauguauguugaaaaauuguauggaccuuacaggaauucugugcagaaggcacacaucuauggaauuacuuuuaguaucucacaagcauuuauguauuuuuccuaugccgguuguuuucgauuuggugcauaucucauugugaauggacauaugcgcuucagagauguuauucugguguuuucugcaauuguauuuggugcaguggcucuaggacaugccaguucauuugcuccagacuaugcuaaagcuaagcugucugcagcccacuuauucaugcuguuugaaagacaaccucugauugacagcuacagugaagaggggcugaagccugauaaauuugaaggaaauauaacauuuaaugaagucguguucaacuaucccacccgagcaaacgugccagugcuucaggggcugagccuggaggugaagaaaggccagacacuagcccuggugggcagcaguggcugugggaagagcacggugguccagcuccuggagcgguucuacgaccccuuggcggggacagugcuucucgauggucaagaagcaaagaaacucaauguccaguggcucagagcucaacucggaaucgugucucaggagccuauccuauuugacugcagcauugccgagaauauugccuauggagacaacagccggguuguaucacaggaugaaauugugagugcagccaaagcugccaacauacauccuuucaucgagacguuaccccacaaauaugaaacaagagugggagauaaggggacucagcucucaggaggucaaaaacagaggauugcuauugcccgagcccucaucagacaaccucaaauccuccuguuggaugaagcuacaucagcucuggauacugaaagugaaaagguuguccaagaagcccuggacaaagccagagaaggccgcaccugcauugugauugcucaccgccuguccaccauccagaaugcagacuuaauagugguguuucagaaugggagagucaaggagcauggcacgcaucagcagcugcuggcacagaaaggcaucuauuuuucaauggucaguguccaggcugggacacagaacuuagauuacaaggaugacgacgauaag

SEQ ID NO: 49 - protein, 1287 aa, Artificial Sequence
  Synthetic Polypeptide
MDLEAAKNGTAWRPTSAEGDFELGISSKQKRKKTKTVKMIGVLTLFRYSDWQDKLFMSLGTIMAIAHGSGLPLMMIVFGEMTDKFVDTAGNFSFPVNFSLSLLNPGKILEEEMTRYAYYYSGLGAGVLVAAYIQVSFWTLAAGRQIRKIRQKFFHAILRQEIGWFDINDTTELNTRLTDDISKISEGIGDKVGMFFQAVATFFAGFIVGFIRGWKLTLVIMAISPILGLSAAVWAKILSAFSDKELAAYAKAGAVAEEALGAIRTVIAFGGQNKELERYQKHLENAKEIGIKKAISANISMGIAFLLIYASYALAFWYGSTLVISKEYTIGNAMTVFFSILIGAFSVGQAAPCIDAFANARGAAYVIFDIIDNNPKIDSFSERGHKPDSIKGNLEFNDVHFSYPSRANVKILKGLNLKVQSGQTVALVGSSGCGKSTTVQLIQRLYDPDEGTINIDGQDIRNFNVNYLREIIGVVSQEPVLFSTTIAENICYGRGNVTMDEIKKAVKEANAYEFIMKLPQKFDTLVGERGAQLSGGQKQRIAIARALVRNPKILLLDEATSALDTESEAEVQAALDKAREGRTTIVIAHRLSTVRNADVIAGFEDGVIVEQGSHSELMKKEGVYFKLVNMQTSGSQIQSEEFELNDEKAATRMAPNGWKSRLFRHSTQKNLKNSQMCQKSLDVETDGLEANVPPVSFLKVLKLNKTEWPYFVVGTVCAIANGGLQPAFSVIFSEIIAIFGPGDDAVKQQKCNIFSLIFLFLGIISFFTFFLQGFTFGKAGEILTRRLRSMAFKAMLRQDMSWFDDHKNSTGALSTRLATDAAQVQGATGTRLALIAQNIANLGTGIIISFIYGWQLTLLLLAVVPIIAVSGIVEMKLLAGNAKRDKKELEAAGKIATEAIENIRTVVSLTQERKFESMYVEKLYGPYRNSVQKAHIYGITFSISQAFMYFSYAGCFRFGAYLIVNGHMRFRDVILVFSAIVFGAVALGHASSFAPDYAKAKLSAAHLFMLFERQPLIDSYSEEGLKPDKFEGNITFNEVVFNYPTRANVPVLQGLSLEVKKGQTLALVGSSGCGKSTVVQLLERFYDPLAGTVLLDGQEAKKLNVQWLRAQLGIVSQEPILFDCSIAENIAYGDNSRVVSQDEIVSAAKAANIHPFIETLPHKYETRVGDKGTQLSGGQKQRIAIARALIRQPQILLLDEATSALDTESEKVVQEALDKAREGRTCIVIAHRLSTIQNADLIVVFQNGRVKEHGTHQQLLAQKGIYFSMVSVQAGTQNLDYKDDDDK

SEQ ID NO: 50 - RNA, 4018 nt, Artificial Sequence
  Synthetic Polynucleotide
gggaaauaagagagaaaagaagaguaagaagaaauauaagagccaccauggaucuugaggcagcgagaaacggaacagcacggcgccuggacggcgacuuugaacuaggcagcaucagcaaccaaggcagagaaaagaagaagaaagugaauuuaauuggccuguugacacuguuccgauacucugacuggcaggauaaauuguuuauguuccugggcacccucauggccauagcucauggaucaggucuuccccucaugaugauagucuuuggagaaaugacagauaaguuuguagauaauacugggaacuuuuccuugccagugaauuuuucauugucaaugcuaaauccaggaagaauuuuggaagaagaaaugacuagauaugcauacuacuauucgggacuaggugguggaguucuuguggcugccuauauccaagucucauucuggacuuuggcagcuggccgacaaauaaagaaaaucaggcaaaaauuuuuucaugccauccuccgacaagaaaugggcugguuugacaucaagggcaccacugaacucaacacacgucuaacagaugacgucuccaaaaucagugaaggaauuggugacaagguuggaauguucuuucaagcaauagccacguuuuuugcaggauucauagugggguucaucagaggauggaagcucacccucgugaucauggccaucagccccauccuggggcucucuacagcuguuugggcaaagauacucucaacauuuagugacaaagagcuagcugcauaugcaaaagcaggugccguggcugaagaggcucugggagccaucaggaccgugauagcuuucgggggccagaacaaagagcuagaaagguaucagaaacauuuagaaaaugccaaaaagauuggaauuaaaaaggcuaucucagccaacaucuccauggguauugcuuucuuguuaauauaugcauccuaugcacuggccuucugguauggauccacucugguuauaucaaaagaauauacaauuggaaaugcaaugacagucuucuucucaauccucaucggggcuuucaguguggggcaggcugcccccuguauugaugcuuucgcuaaugcaagaggagcagccuaugugaucuuugacauuauugauaauaauccuaaaauugacaguuuuucagagagaggacacaaaccagacaacaucaaaggaaauuuggaguucagugauguucauuuuuccuauccaucucgggcuaauaucaagaucuugaagggccucaaccugaaggugaagaguggacagacaguggcucugguuggcaacagcggcuguggaaaaagcacaacuguccagcugcugcagaggcucuacgaccccacagaggguaagauuagcaucgaugggcaggauaucaggaacuuuaacgucaggugucuaagggaaaucauuggugugguaagucaagagcccgugcuguucucuacuacgaucgcugaaaauauccgcuauggccgugggaauguaacgauggaugagauugagaaagccgucaaagaggccaaugccuaugacuucaucaugaaacugccccagaaauuugacacccugguuggugauagaggggcgcagcugagugggggacagaaacagagaaucgccauugcccgggcccugguccgcaaccccaagauccuccugcuggacgaggccaccucagcccuggacacugaaagugaagcugaggugcaggccgcacuggauaaggccagagaaggccgaaccaccauugugauagcucaccgauugucuaccauccggaacgcagaugucaucgcuggguuugaggauggagucauuguggaacaaggaagucacagugagcugaugaagaaggaagggaucuacuucagacucguuaacaugcagacagcaggaagccagauccugucagaagaauuugaaguugagcuaagugacgaaaaggcugcuggagauguggccccaaauggcuggaaagcacgcauauuuaggaauucuacaaagaaaagucuuaaaaguccacaucagaauaggcuggaugaagaaaccaaugaacuugaugcaaacgugccaccagugucuuuucugaaggucuuaaaacugaauaaaacagaguggcccuacuuuguggugggaacagucugugccauugccaauggagcccuccagccggcuuucuccaucauccugucugagaugauagcuaucuuuggcccuggggaugacgcagugaagcagcaaaaguguaacauguucucccuggucuucuugggccuaggaguccucuccuucuuuacuuucuuccuucagggcuucacguuugggaaagcuggagagauccucaccacaaggcuccgguccauggccuuuaaagcgaugcuaaggcaggacaugagcugguuugaugaucauaaaaacaguacuggagcacuuucuacaagacucgccacagaugcugcgcaaguccaaggagccacgggaaccagguuggcuuuaauugcacagaacacagccaaccuuggaaccgguauuauuauaucauuuauuuacgguuggcaacugacacuucugcuguuaucgguuguuccauucauugcuguagcaggaauuguugaaaugaaaauguuggcuggcaaugccaagagagauaaaaaggaaauggaagcugcuggaaagauugcaacagaggcaauagaaaauauucgaacuguuguauccuugacccaagaaagaaaauuugagucaauguauguugaaaaauugcauggaccuuacaggaauucggugcggaaggcacacaucuacggcaucacuuuuagcaucucccaagcauucauguauuuuucuuaugcuggcuguuuucgauuugguucuuaccuaauugugaauggacauaugcgcuucaaagaugucauucuggucuuuucugcaauugugcuuggcgcgguggcucuaggacacgccagcucauuugcuccggacuaugcaaaagccaagcugucugcagcauacuuguucagccuguuugaaagacaaccucugauugacagcuacaguggagaagggcuguggccugauaaguuugaaggaagcgugacauuuaaugaagucguguucaacuaucccacccgggccaacgugccagugcuucaggggcugagccuugaggugaagaagggccagacgcuggcccuggugggcagcaguggcugcgggaagagcacagugguccagcugcucgagcgcuucuaugaccccauggcuggaucagugcucuuagauggucaagaagcaaagaaacucaauguccaguggcuccgagcucaacugggcauugugucccaggaacccauucucuuugacugcagcaucgcagagaacaucgccuauggagacaacagccgggucgugccucaugaugagauugugagggcagccaaggaggccaacauccaccccuucaucgagacgcugccccaaaaauauaacacaagaguaggagacaaggggacgcagcucucugggggccagaagcagaggauugccaucgcccgagcccucaucagacagccucggguccuacugcuggaugaagccacgucagcucuggauacugagagugaaaagguuguccaggaagcacuggacaaagccagggaaggccgcaccugcauugugaucgcucaccgccuguccaccauccagaacgcggacuugaucguggugauugagaacggcaaggucaaggagcacggcacccaccagcagcugcuggcgcagaagggcaucuauuucucaauggucaacauccaggccggcacacagaacuuagauuacaaggaugacgacgauaagugauaauaggcuggagccucgguggccaugcuucuugccccuugggccuccccccagccccuccuccccuuccugcacccguacccccguggucuuugaauaaagucugagugggcggc

SEQ ID NO: 51 - RNA, 3852 nt, Artificial Sequence
  Synthetic Polynucleotide
auggaucuugaggcagcgagaaacggaacagcacggcgccuggacggcgacuuugaacuaggcagcaucagcaaccaaggcagagaaaagaagaagaaagugaauuuaauuggccuguugacacuguuccgauacucugacuggcaggauaaauuguuuauguuccugggcacccucauggccauagcucauggaucaggucuuccccucaugaugauagucuuuggagaaaugacagauaaguuuguagauaauacugggaacuuuuccuugccagugaauuuuucauugucaaugcuaaauccaggaagaauuuuggaagaagaaaugacuagauaugcauacuacuauucgggacuaggugguggaguucuuguggcugccuauauccaagucucauucuggacuuuggcagcuggccgacaaauaaagaaaaucaggcaaaaauuuuuucaugccauccuccgacaagaaaugggcugguuugacaucaagggcaccacugaacucaacacacgucuaacagaugacgucuccaaaaucagugaaggaauuggugacaagguuggaauguucuuucaagcaauagccacguuuuuugcaggauucauagugggguucaucagaggauggaagcucacccucgugaucauggccaucagccccauccuggggcucucuacagcuguuugggcaaagauacucucaacauuuagugacaaagagcuagcugcauaugcaaaagcaggugccguggcugaagaggcucugggagccaucaggaccgugauagcuuucgggggccagaacaaagagcuagaaagguaucagaaacauuuagaaaaugccaaaaagauuggaauuaaaaaggcuaucucagccaacaucuccauggguauugcuuucuuguuaauauaugcauccuaugcacuggccuucugguauggauccacucugguuauaucaaaagaauauacaauuggaaaugcaaugacagucuucuucucaauccucaucggggcuuucaguguggggcaggcugcccccuguauugaugcuuucgcuaaugcaagaggagcagccuaugugaucuuugacauuauugauaauaauccuaaaauugacaguuuuucagagagaggacacaaaccagacaacaucaaaggaaauuuggaguucagugauguucauuuuuccuauccaucucgggcuaauaucaagaucuugaagggccucaaccugaaggugaagaguggacagacaguggcucugguuggcaacagcggcuguggaaaaagcacaacuguccagcugcugcagaggcucuacgaccccacagaggguaagauuagcaucgaugggcaggauaucaggaacuuuaacgucaggugucuaagggaaaucauuggugugguaagucaagagcccgugcuguucucuacuacgaucgcugaaaauauccgcuauggccgugggaauguaacgauggaugagauugagaaagccgucaaagaggccaaugccuaugacuucaucaugaaacugccccagaaauuugacacccugguuggugauagaggggcgcagcugagugggggacagaaacagagaaucgccauugcccgggcccugguccgcaaccccaagauccuccugcuggacgaggccaccucagcccuggacacugaaagugaagcugaggugcaggccgcacuggauaaggccagagaaggccgaaccaccauugugauagcucaccgauugucuaccauccggaacgcagaugucaucgcuggguuugaggauggagucauuguggaacaaggaagucacagugagcugaugaagaaggaagggaucuacuucagacucguuaacaugcagacagcaggaagccagauccugucagaagaauuugaaguugagcuaagugacgaaaaggcugcuggagauguggccccaaauggcuggaaagcacgcauauuuaggaauucuacaaagaaaagucuuaaaaguccacaucagaauaggcuggaugaagaaaccaaugaacuugaugcaaacgugccaccagugucuuuucugaaggucuuaaaacugaauaaaacagaguggcccuacuuuguggugggaacagucugugccauugccaauggagcccuccagccggcuuucuccaucauccugucugagaugauagcuaucuuuggcccuggggaugacgcagugaagcagcaaaaguguaacauguucucccuggucuucuugggccuaggaguccucuccuucuuuacuuucuuccuucagggcuucacguuugggaaagcuggagagauccucaccacaaggcuccgguccauggccuuuaaagcgaugcuaaggcaggacaugagcugguuugaugaucauaaaaacaguacuggagcacuuucuacaagacucgccacagaugcugcgcaaguccaaggagccacgggaaccagguuggcuuuaauugcacagaacacagccaaccuuggaaccgguauuauuauaucauuuauuuacgguuggcaacugacacuucugcuguuaucgguuguuccauucauugcuguagcaggaauuguugaaaugaaaauguuggcuggcaaugccaagagagauaaaaaggaaauggaagcugcuggaaagauugcaacagaggcaauagaaaauauucgaacuguuguauccuugacccaagaaagaaaauuugagucaauguauguugaaaaauugcauggaccuuacaggaauucggugcggaaggcacacaucuacggcaucacuuuuagcaucucccaagcauucauguauuuuucuuaugcuggcuguuuucgauuugguucuuaccuaauugugaauggacauaugcgcuucaaagaugucauucuggucuuuucugcaauugugcuuggcgcgguggcucuaggacacgccagcucauuugcuccggacuaugcaaaagccaagcugucugcagcauacuuguucagccuguuugaaagacaaccucugauugacagcuacaguggagaagggcuguggccugauaaguuugaaggaagcgugacauuuaaugaagucguguucaacuaucccacccgggccaacgugccagugcuucaggggcugagccuugaggugaagaagggccagacgcuggcccuggugggcagcaguggcugcgggaagagcacagugguccagcugcucgagcgcuucuaugaccccauggcuggaucagugcucuuagauggucaagaagcaaagaaacucaauguccaguggcuccgagcucaacugggcauugugucccaggaacccauucucuuugacugcagcaucgcagagaacaucgccuauggagacaacagccgggucgugccucaugaugagauugugagggcagccaaggaggccaacauccaccccuucaucgagacgcugccccaaaaauauaacacaagaguaggagacaaggggacgcagcucucugggggccagaagcagaggauugccaucgcccgagcccucaucagacagccucggguccuacugcuggaugaagccacgucagcucuggauacugagagugaaaagguuguccaggaagcacuggacaaagccagggaaggccgcaccugcauugugaucgcucaccgccuguccaccauccagaacgcggacuugaucguggugauugagaacggcaaggucaaggagcacggcacccaccagcagcugcuggcgcagaagggcaucuauuucucaauggucaacauccaggccggcacacagaacuuagauuacaaggaugacgacgauaag

SEQ ID NO: 52 - protein, 1284 aa, Artificial Sequence
  Synthetic Polypeptide
MDLEAARNGTARRLDGDFELGSISNQGREKKKKVNLIGLLTLFRYSDWQDKLFMFLGTLMAIAHGSGLPLMMIVFGEMTDKFVDNTGNFSLPVNFSLSMLNPGRILEEEMTRYAYYYSGLGGGVLVAAYIQVSFWTLAAGRQIKKIRQKFFHAILRQEMGWFDIKGTTELNTRLTDDVSKISEGIGDKVGMFFQAIATFFAGFIVGFIRGWKLTLVIMAISPILGLSTAVWAKILSTFSDKELAAYAKAGAVAEEALGAIRTVIAFGGQNKELERYQKHLENAKKIGIKKAISANISMGIAFLLIYASYALAFWYGSTLVISKEYTIGNAMTVFFSILIGAFSVGQAAPCIDAFANARGAAYVIFDIIDNNPKIDSFSERGHKPDNIKGNLEFSDVHFSYPSRANIKILKGLNLKVKSGQTVALVGNSGCGKSTTVQLLQRLYDPTEGKISIDGQDIRNFNVRCLREIIGVVSQEPVLFSTTIAENIRYGRGNVTMDEIEKAVKEANAYDFIMKLPQKFDTLVGDRGAQLSGGQKQRIAIARALVRNPKILLLDEATSALDTESEAEVQAALDKAREGRTTIVIAHRLSTIRNADVIAGFEDGVIVEQGSHSELMKKEGIYFRLVNMQTAGSQILSEEFEVELSDEKAAGDVAPNGWKARIFRNSTKKSLKSPHQNRLDEETNELDANVPPVSFLKVLKLNKTEWPYFVVGTVCAIANGALQPAFSIILSEMIAIFGPGDDAVKQQKCNMFSLVFLGLGVLSFFTFFLQGFTFGKAGEILTTRLRSMAFKAMLRQDMSWFDDHKNSTGALSTRLATDAAQVQGATGTRLALIAQNTANLGTGIIISFIYGWQLTLLLLSVVPFIAVAGIVEMKMLAGNAKRDKKEMEAAGKIATEAIENIRTVVSLTQERKFESMYVEKLHGPYRNSVRKAHIYGITFSISQAFMYFSYAGCFRFGSYLIVNGHMRFKDVILVFSAIVLGAVALGHASSFAPDYAKAKLSAAYLFSLFERQPLIDSYSGEGLWPDKFEGSVTFNEVVFNYPTRANVPVLQGLSLEVKKGQTLALVGSSGCGKSTVVQLLERFYDPMAGSVLLDGQEAKKLNVQWLRAQLGIVSQEPILFDCSIAENIAYGDNSRVVPHDEIVRAAKEANIHPFIETLPQKYNTRVGDKGTQLSGGQKQRIAIARALIRQPRVLLLDEATSALDTESEKVVQEALDKAREGRTCIVIAHRLSTIQNADLIVVIENGKVKEHGTHQQLLAQKGIYFSMVNIQAGTQNLDYKDDDDK

SEQ ID NO: 53 - RNA, 4003 nt, Artificial Sequence
  Synthetic Polynucleotide
gggaaauaagagagaaaagaagaguaagaagaaauauaagagccaccauggauuuagaagccgccaagaacggaaccgccuggcgucccaccagcgccgagggcgauuucgaacuuggcaucucaagcaaacaaaagaggaaaaaaacaaagaccgugaagaugauaggcguucucacccuguucagguacagcgauuggcaggauaagcuguucaugucccuggguacaauuauggccaucgcccauggcuccggccugccgcugaugaugaucguuuuuggagagaugaccgacaaauuuguggauaccgccgggaacuucucauucccugugaacuucagccugagccugcugaacccuggcaagauccuggaggaagagaugaccagauacgccuacuacuacucuggccugggugcgggaguccugguugccgcuuacauucaggugagcuuuuggacccuggccgccggcagacagauccguaaaaucaggcaaaaguucuuccacgccauccucagacaggaaaucggcugguucgacaucaaugacaccaccgagcugaacacaaggcugacagacgauaucucuaagaucucagaaggcaucggagauaaggugggcauguucuuccaggccgucgccaccuuuuucgccggcuucaucgugggcuucauccgcggauggaaacugacccuugugaucauggccaucagcccaauccugggccugagcgccgccgugugggccaagauccugucugcuuuuagcgacaaggagcuggccgcguacgcuaaggccggcgccguggccgaggaggcucugggcgccaucagaaccgugaucgcuuuugggggacaaaacaaggagcuggaacgguaccagaagcaccuggagaacgcuaaggagaucgggaucaagaaggccaucuccgcuaauaucagcauggggaucgccuucuuacugauauacgcuagcuacgcccuggccuuuugguacggcagcacccuggugauuuccaaggaguacaccauuggcaacgccaugaccguguucuucucuauccucaucggugcuuuuuccguuggccaggccgcccccugcaucgacgccuucgccaacgcuagaggcgccgccuacgucaucuucgauaucaucgacaacaauccaaagauugacagcuucagcgagcggggccauaagccagacucaaucaaggggaaccuugaauucaaugacguccauuucuccuaccccucucgagccaaugugaagauacugaaggggcugaaccugaaggugcaguccggucagaccguugcccuggugggcagcuccggaugugggaagucuaccaccguacaguugauccagcgacuguacgacccagacgaaggcaccaucaacauugauggccaggacauccggaauuuuaaugugaacuaccugagagagauuaucggcguggucucccaggaacccguccuguucuccacaacuaucgccgagaacaucuguuacggaagaggaaacgugaccauggacgagauaaagaaggccgucaaagaggcaaaugccuacgaguucauuaugaagcugccucagaaguucgacacccuggucggcgagagaggggcccagcugucugggggccagaagcagagaaucgccaucgccagggcucucguccggaaccccaagauucuccuccuggaugaggccaccagcgcccuggacaccgaaagcgaagccgagguccaggccgcccuggacaaggcccgagagggcaggaccaccaucgugaucgcccauagguugagcaccgugaggaaugccgacgugaucgcuggauucgaggacggcguuaucguggagcagggcucucacucggagcugaugaaaaaagagggcguguacuucaaacucgugaacaugcagacuuccggaucacagauccaguccgaggaguucgagcucaacgaugagaaggcugccacuagaauggcaccaaacggcuggaagucccgucuuuucagacacucuacgcagaagaaucugaagaacagccagaugugccagaagucucuggacguggaaacggacggccuggaagccaacgucccucccguguccuuccugaaaguccugaagcuaaacaaaacagaguggccuuacuuuguggugggcacuguuugcgccaucgccaacggcggccugcagccugcguucagcgugaucuuuagcgagauuauagcuauuuuuggcccuggagacgaugcugugaagcaacagaagugcaacaucuuuagucuuaucuuccuuuuccucggaaucaucagcuuuuucacguucuuccuucaggguuuuaccuuuggcaaggccggagagauacucacuagacgccugagaucaauggcuuuuaaggccaugcugagacaggacaugagcugguucgacgaccacaagaauucuaccggagcacuguccacaagacuggcaaccgacgccgcccagguccagggggccacuggcacccggcuggcccugaucgcucaaaacauugcaaaccugggaacuggcaucaucauuagcuucaucuauggauggcagcugacacuucugcugcuggccgucgugccaauuaucgccgugagcgggaucgucgagaugaaacuccucgcugggaaugcuaagagggacaagaaggagcuggaggccgcgggcaagaucgccacugaggcuaucgagaauauccgcaccguugugagcuugacacaggagagaaaguucgagagcauguauguggagaagcuguacggaccauacagaaauucagugcagaaggcccacaucuacggaauuaccuucuccaucagccaggcauucauguacuuuucuuacgccggcuguuuuagauucggcgcauaccugaucgugaacggccauaugagguucagagacgugauccugguuuucuccgccauaguguuuggcgcugucgcucugggccacgccagcucauuugcucccgauuaugcaaaggcaaagcuguccgccgcacaccucuucaugcucuucgagcgucagccucugaucgacuccuacucagaggaggggcucaagcccgacaaguucgaaggcaacaucacuuucaacgaagugguguucaacuacccuacccgggcaaacgugccugugcugcagggccugagccuggaggugaagaaaggacagacccuggcucugguaggcucauccggaugcggcaaaucaacaguggugcaacugcucgagcgguucuacgacccccuggcggggaccguucuccuggauggccaggaggcaaagaagcugaacgugcaguggcugagagcacagcuggggauugugucccaggaaccgauucuguuugacugcagcaucgccgagaacaucgccuacggagauaacagcaggguggugagccaggaugagaucgugagcgccgcaaaagccgccaacauccaccccuucauugagacccugccacacaaguacgagaccagagugggcgacaagggcacccagcugucaggaggacagaagcagcguaucgccaucgccagagcccugauucggcagccccagauucugcugcuggacgaggcuacaagcgcucuggacaccgaguccgaaaagguggugcaggaggcacuugacaaggccagagagggcagaaccugcauagugauugcccacagacugagcaccauucaaaacgccgaccugaucgugguuuuccagaaugggcggguuaaggagcauggcacccaccagcaacugcuggcccagaagggcaucuauuucagcauggugagcgugcaggccggcacacagaaucugugauaauaggcuggagccucgguggccaugcuucuugccccuugggccuccccccagccccuccuccccuuccugcacccguacccccguggucuuugaauaaagucugagugggcggc

SEQ ID NO: 54 - RNA, 3837 nt, Artificial Sequence
  Synthetic Polynucleotide
auggauuuagaagccgccaagaacggaaccgccuggcgucccaccagcgccgagggcgauuucgaacuuggcaucucaagcaaacaaaagaggaaaaaaacaaagaccgugaagaugauaggcguucucacccuguucagguacagcgauuggcaggauaagcuguucaugucccuggguacaauuauggccaucgcccauggcuccggccugccgcugaugaugaucguuuuuggagagaugaccgacaaauuuguggauaccgccgggaacuucucauucccugugaacuucagccugagccugcugaacccuggcaagauccuggaggaagagaugaccagauacgccuacuacuacucuggccugggugcgggaguccugguugccgcuuacauucaggugagcuuuuggacccuggccgccggcagacagauccguaaaaucaggcaaaaguucuuccacgccauccucagacaggaaaucggcugguucgacaucaaugacaccaccgagcugaacacaaggcugacagacgauaucucuaagaucucagaaggcaucggagauaaggugggcauguucuuccaggccgucgccaccuuuuucgccggcuucaucgugggcuucauccgcggauggaaacugacccuugugaucauggccaucagcccaauccugggccugagcgccgccgugugggccaagauccugucugcuuuuagcgacaaggagcuggccgcguacgcuaaggccggcgccguggccgaggaggcucugggcgccaucagaaccgugaucgcuuuugggggacaaaacaaggagcuggaacgguaccagaagcaccuggagaacgcuaaggagaucgggaucaagaaggccaucuccgcuaauaucagcauggggaucgccuucuuacugauauacgcuagcuacgcccuggccuuuugguacggcagcacccuggugauuuccaaggaguacaccauuggcaacgccaugaccguguucuucucuauccucaucggugcuuuuuccguuggccaggccgcccccugcaucgacgccuucgccaacgcuagaggcgccgccuacgucaucuucgauaucaucgacaacaauccaaagauugacagcuucagcgagcggggccauaagccagacucaaucaaggggaaccuugaauucaaugacguccauuucuccuaccccucucgagccaaugugaagauacugaaggggcugaaccugaaggugcaguccggucagaccguugcccuggugggcagcuccggaugugggaagucuaccaccguacaguugauccagcgacuguacgacccagacgaaggcaccaucaacauugauggccaggacauccggaauuuuaaugugaacuaccugagagagauuaucggcguggucucccaggaacccguccuguucuccacaacuaucgccgagaacaucuguuacggaagaggaaacgugaccauggacgagauaaagaaggccgucaaagaggcaaaugccuacgaguucauuaugaagcugccucagaaguucgacacccuggucggcgagagaggggcccagcugucugggggccagaagcagagaaucgccaucgccagggcucucguccggaaccccaagauucuccuccuggaugaggccaccagcgcccuggacaccgaaagcgaagccgagguccaggccgcccuggacaaggcccgagagggcaggaccaccaucgugaucgcccauagguugagcaccgugaggaaugccgacgugaucgcuggauucgaggacggcguuaucguggagcagggcucucacucggagcugaugaaaaaagagggcguguacuucaaacucgugaacaugcagacuuccggaucacagauccaguccgaggaguucgagcucaacgaugagaaggcugccacuagaauggcaccaaacggcuggaagucccgucuuuucagacacucuacgcagaagaaucugaagaacagccagaugugccagaagucucuggacguggaaacggacggccuggaagccaacgucccucccguguccuuccugaaaguccugaagcuaaacaaaacagaguggccuuacuuuguggugggcacuguuugcgccaucgccaacggcggccugcagccugcguucagcgugaucuuuagcgagauuauagcuauuuuuggcccuggagacgaugcugugaagcaacagaagugcaacaucuuuagucuuaucuuccuuuuccucggaaucaucagcuuuuucacguucuuccuucaggguuuuaccuuuggcaaggccggagagauacucacuagacgccugagaucaauggcuuuuaaggccaugcugagacaggacaugagcugguucgacgaccacaagaauucuaccggagcacuguccacaagacuggcaaccgacgccgcccagguccagggggccacuggcacccggcuggcccugaucgcucaaaacauugcaaaccugggaacuggcaucaucauuagcuucaucuauggauggcagcugacacuucugcugcuggccgucgugccaauuaucgccgugagcgggaucgucgagaugaaacuccucgcugggaaugcuaagagggacaagaaggagcuggaggccgcgggcaagaucgccacugaggcuaucgagaauauccgcaccguugugagcuugacacaggagagaaaguucgagagcauguauguggagaagcuguacggaccauacagaaauucagugcagaaggcccacaucuacggaauuaccuucuccaucagccaggcauucauguacuuuucuuacgccggcuguuuuagauucggcgcauaccugaucgugaacggccauaugagguucagagacgugauccugguuuucuccgccauaguguuuggcgcugucgcucugggccacgccagcucauuugcucccgauuaugcaaaggcaaagcuguccgccgcacaccucuucaugcucuucgagcgucagccucugaucgacuccuacucagaggaggggcucaagcccgacaaguucgaaggcaacaucacuuucaacgaagugguguucaacuacccuacccgggcaaacgugccugugcugcagggccugagccuggaggugaagaaaggacagacccuggcucugguaggcucauccggaugcggcaaaucaacaguggugcaacugcucgagcgguucuacgacccccuggcggggaccguucuccuggauggccaggaggcaaagaagcugaacgugcaguggcugagagcacagcuggggauugugucccaggaaccgauucuguuugacugcagcaucgccgagaacaucgccuacggagauaacagcaggguggugagccaggaugagaucgugagcgccgcaaaagccgccaacauccaccccuucauugagacccugccacacaaguacgagaccagagugggcgacaagggcacccagcugucaggaggacagaagcagcguaucgccaucgccagagcccugauucggcagccccagauucugcugcuggacgaggcuacaagcgcucuggacaccgaguccgaaaagguggugcaggaggcacuugacaaggccagagagggcagaaccugcauagugauugcccacagacugagcaccauucaaaacgccgaccugaucgugguuuuccagaaugggcggguuaaggagcauggcacccaccagcaacugcuggcccagaagggcaucuauuucagcauggugagcgugcaggccggcacacagaaucug

SEQ ID NO: 55 - protein, 1279 aa, Artificial Sequence; identical to SEQ ID NO: 3
  Synthetic Polypeptide

SEQ ID NO: 56 - RNA, 4003 nt, Artificial Sequence
  Synthetic Polynucleotide
gggaaauaagagagaaaagaagaguaagaagaaauauaagagccaccauggaccuagaggcugccaagaacgggaccgccuggaggcccacaagcgcagaaggggacuuugaacugggcaucagcuccaagcagaaaagaaagaagacaaaaacagucaagaugaucggcgugcugacacuguucagauacagcgacuggcaggacaaacuguucaugagccugggcaccaucauggccaucgcgcaugguagcggccucccucugaugaugaucguauucggcgaaaugaccgauaaguucguugacacugccgggaacuucagcuuucccgucaacuuuagccugagccuguugaaccccggcaagauccuggaggaggagaugaccagguaugccuauuauuauagcggacugggcgcaggggugcugguggcggccuacauacaggugucuuuuuggacucuggccgccggcagacagauccggaaaauccggcagaaguucuuccaugcuauccuuaggcaggagauuggcugguucgacaucaacgauacuacugagcucaacacacgacuuaccgacgacaucagcaagauuuccgagggcaucggcgauaaggugggcauguucuuccaagccguugccacauuuuucgcaggguucaucguuggcuucauuagaggcuggaagcucacacuggucaucauggcaaucagccccauccuggggcugagcgccgccgugugggcaaagauccucagcgcuuucagugacaaggagcuggcugccuacgcgaaggccggcgccguggcugaggaggcgcugggcgccauacgaaccgugaucgccuucggaggucaaaacaaggagcucgagagauaucagaaacaccuggagaacgccaaagagauuggaaucaagaaagcuaucucugccaacauuagcaugggcaucgccuuccuucugauauacgccagcuacgcacuggccuuuugguacggcucuacacuggugaucuccaaggaauacaccaucggaaaugccaugaccguguucuuuagcauccugaucggcgccuucagcguggggcaggccgcucccuguaucgacgcguuugccaacgcuagaggcgccgccuacgucaucuuugacaucaucgacaauaacccuaagauugacucuuuuagcgaaagaggccacaagccagauagcaucaagggcaaccuugaguucaaugacguccacuucuccuaucccagccgggccaaugugaagauucugaagggacugaaccugaagguacagagcggccagacuguggcccuggucggcagcuccggaugcggaaagucuaccacaguccagcugauccagaggcucuacgauccagacgagggaacgaucaacaucgauggccaggauauccggaacuucaacgugaauuaucucagagagaucaucggcguggugucccaagagcccgugcucuucagcacaaccauugccgaaaacauaugcuacggcaggggcaacguuacaauggacgagaucaagaaggcggugaaggaggccaaugcuuaugaauucauuaugaagcugccccagaaguuugacacccuggugggcgagagaggcgcccagcuuuccggcggccagaagcagagaauugccaucgccagagcacugguuagaaaccccaagauccugcugcuggacgaggccaccuccgcccuggacaccgagagcgaggccgagguccaggccgccuuggacaaagccagagagggcagaaccaccaucgugaucgcacaccgccuguccaccgugaggaaugccgacgugaucgccggauucgaagacggcgugaucguggagcagggaagccacagcgagcugaugaagaaggagggagucuacuuuaaacucgugaauaugcagacgagcgggagccagauccagagcgaggaguucgaacugaacgaugagaaggccgcaacgagaauggcacccaacggcuggaagagcaggcuguucagacacagcacgcagaaaaaucuaaaaaacucccagaugugccagaagucccucgacguggaaaccgauggccuggaggccaacgugccccccgucaguuuccugaaagugcugaagcucaacaagaccgaguggcccuacuucgucguggggaccgugugugccauugccaauggcgguuugcagcccgcguucagcgugauuuuuagcgaaauuaucgccauuuuuggccccggcgacgacgccgugaaacagcagaagugcaacauuuucagucucaucuuucucuuucugggcaucaucucuuucuuuaccuuuuuccugcagggauucacguuuggcaaggcuggcgagauucugacaagacgccuccggagcauggccuucaaggccaugcucagacaggacauguccugguucgacgaucacaagaacucaaccggggcucugagcaccagguuagcuaccgaugcggcucagguccagggcgccaccggcacucgccucgcccugaucgcccagaacaucgcuaaccugggaacaggcaucaucaucucauuuaucuacggcuggcagcugacccugcuccuucuggccguugugcccauaauugccgugagcggcauaguggagaugaagcuccuggcugggaacgcaaagcgggauaagaaggagcuggaggccgcuggaaagaucgcuacagaagcaaucgagaacaucagaaccguggugucccugacacaagagcggaaguucgaguccauguacguggagaaacuguacggaccuuacagaaacuccguccagaaggcccauauauauggaaucaccuuuaguauuagccaggccuucauguacuucuccuacgcuggcugcuuucgguucggugccuaccugauagugaauggacacaugcgguucagggaugucaucuugguguucuccgccaucgucuuuggcgccguggcccugggccacgcuuccagcuuugccccugauuacgccaaggccaagcugagcgccgcccaccuguuuaugcucuucgaaaggcagccgcugauagauagcuacucugaagagggcuugaagcccgacaaguucgagggcaacauaaccuuuaacgaagucguguucaacuacccuaccagagccaacgucccagugcuucagggccugagcuuggaggugaagaaaggacagacccuugccuuagugggcucuaguggcugcgggaagagcacugugguccagcucuuggagagauucuacgaccccuuagcaggcaccguccuucuggauggacaggaggccaaaaaacucaacgugcaguggcugagagcacagcugggcauugugagccaggaacccauccuguuugacuguuccaucgccgagaauauugcauacggcgacaacagcaggguggugagccaggaugagaucguguccgcagcgaaagcagccaacauacaccccuucaucgagacacugccucacaaguacgagaccagggugggcgauaagggcacacagcugucuggcggccagaagcagcguauugccaucgccagagcccugauuagacagccacagauccugcugcuggaugaagcuaccucugcacuugacaccgaguccgagaaggucgugcaggaggcccuggauaaggcgagagaaggccgcacuugcauagugaucgcgcacagacucagcacaauccaaaacgccgaccuuaucguugucuuccaaaacgggagggugaaggagcauggcacucaccaacagcugcuugcccagaaggggauauacuucuccaugguauccguacaggcuggcacccagaaucugugauaauaggcuggagccucgguggccaugcuucuugccccuugggccuccccccagccccuccuccccuuccugcacccguacccccguggucuuugaauaaagucugagugggcggc

SEQ ID NO: 57 - RNA, 3837 nt, Artificial Sequence
  Synthetic Polynucleotide
auggaccuagaggcugccaagaacgggaccgccuggaggcccacaagcgcagaaggggacuuugaacugggcaucagcuccaagcagaaaagaaagaagacaaaaacagucaagaugaucggcgugcugacacuguucagauacagcgacuggcaggacaaacuguucaugagccugggcaccaucauggccaucgcgcaugguagcggccucccucugaugaugaucguauucggcgaaaugaccgauaaguucguugacacugccgggaacuucagcuuucccgucaacuuuagccugagccuguugaaccccggcaagauccuggaggaggagaugaccagguaugccuauuauuauagcggacugggcgcaggggugcugguggcggccuacauacaggugucuuuuuggacucuggccgccggcagacagauccggaaaauccggcagaaguucuuccaugcuauccuuaggcaggagauuggcugguucgacaucaacgauacuacugagcucaacacacgacuuaccgacgacaucagcaagauuuccgagggcaucggcgauaaggugggcauguucuuccaagccguugccacauuuuucgcaggguucaucguuggcuucauuagaggcuggaagcucacacuggucaucauggcaaucagccccauccuggggcugagcgccgccgugugggcaaagauccucagcgcuuucagugacaaggagcuggcugccuacgcgaaggccggcgccguggcugaggaggcgcugggcgccauacgaaccgugaucgccuucggaggucaaaacaaggagcucgagagauaucagaaacaccuggagaacgccaaagagauuggaaucaagaaagcuaucucugccaacauuagcaugggcaucgccuuccuucugauauacgccagcuacgcacuggccuuuugguacggcucuacacuggugaucuccaaggaauacaccaucggaaaugccaugaccguguucuuuagcauccugaucggcgccuucagcguggggcaggccgcucccuguaucgacgcguuugccaacgcuagaggcgccgccuacgucaucuuugacaucaucgacaauaacccuaagauugacucuuuuagcgaaagaggccacaagccagauagcaucaagggcaaccuugaguucaaugacguccacuucuccuaucccagccgggccaaugugaagauucugaagggacugaaccugaagguacagagcggccagacuguggcccuggucggcagcuccggaugcggaaagucuaccacaguccagcugauccagaggcucuacgauccagacgagggaacgaucaacaucgauggccaggauauccggaacuucaacgugaauuaucucagagagaucaucggcguggugucccaagagcccgugcucuucagcacaaccauugccgaaaacauaugcuacggcaggggcaacguuacaauggacgagaucaagaaggcggugaaggaggccaaugcuuaugaauucauuaugaagcugccccagaaguuugacacccuggugggcgagagaggcgcccagcuuuccggcggccagaagcagagaauugccaucgccagagcacugguuagaaaccccaagauccugcugcuggacgaggccaccuccgcccuggacaccgagagcgaggccgagguccaggccgccuuggacaaagccagagagggcagaaccaccaucgugaucgcacaccgccuguccaccgugaggaaugccgacgugaucgccggauucgaagacggcgugaucguggagcagggaagccacagcgagcugaugaagaaggagggagucuacuuuaaacucgugaauaugcagacgagcgggagccagauccagagcgaggaguucgaacugaacgaugagaaggccgcaacgagaauggcacccaacggcuggaagagcaggcuguucagacacagcacgcagaaaaaucuaaaaaacucccagaugugccagaagucccucgacguggaaaccgauggccuggaggccaacgugccccccgucaguuuccugaaagugcugaagcucaacaagaccgaguggcccuacuucgucguggggaccgugugugccauugccaauggcgguuugcagcccgcguucagcgugauuuuuagcgaaauuaucgccauuuuuggccccggcgacgacgccgugaaacagcagaagugcaacauuuucagucucaucuuucucuuucugggcaucaucucuuucuuuaccuuuuuccugcagggauucacguuuggcaaggcuggcgagauucugacaagacgccuccggagcauggccuucaaggccaugcucagacaggacauguccugguucgacgaucacaagaacucaaccggggcucugagcaccagguuagcuaccgaugcggcucagguccagggcgccaccggcacucgccucgcccugaucgcccagaacaucgcuaaccugggaacaggcaucaucaucucauuuaucuacggcuggcagcugacccugcuccuucuggccguugugcccauaauugccgugagcggcauaguggagaugaagcuccuggcugggaacgcaaagcgggauaagaaggagcuggaggccgcuggaaagaucgcuacagaagcaaucgagaacaucagaaccguggugucccugacacaagagcggaaguucgaguccauguacguggagaaacuguacggaccuuacagaaacuccguccagaaggcccauauauauggaaucaccuuuaguauuagccaggccuucauguacuucuccuacgcuggcugcuuucgguucggugccuaccugauagugaauggacacaugcgguucagggaugucaucuugguguucuccgccaucgucuuuggcgccguggcccugggccacgcuuccagcuuugccccugauuacgccaaggccaagcugagcgccgcccaccuguuuaugcucuucgaaaggcagccgcugauagauagcuacucugaagagggcuugaagcccgacaaguucgagggcaacauaaccuuuaacgaagucguguucaacuacccuaccagagccaacgucccagugcuucagggccugagcuuggaggugaagaaaggacagacccuugccuuagugggcucuaguggcugcgggaagagcacugugguccagcucuuggagagauucuacgaccccuuagcaggcaccguccuucuggauggacaggaggccaaaaaacucaacgugcaguggcugagagcacagcugggcauugugagccaggaacccauccuguuugacuguuccaucgccgagaauauugcauacggcgacaacagcaggguggugagccaggaugagaucguguccgcagcgaaagcagccaacauacaccccuucaucgagacacugccucacaaguacgagaccagggugggcgauaagggcacacagcugucuggcggccagaagcagcguauugccaucgccagagcccugauuagacagccacagauccugcugcuggaugaagcuaccucugcacuugacaccgaguccgagaaggucgugcaggaggcccuggauaaggcgagagaaggccgcacuugcauagugaucgcgcacagacucagcacaauccaaaacgccgaccuuaucguugucuuccaaaacgggagggugaaggagcauggcacucaccaacagcugcuugcccagaaggggauauacuucuccaugguauccguacaggcuggcacccagaaucug

SEQ ID NO: 58 - protein, 1279 aa, Artificial Sequence; identical to SEQ ID NO: 3
  Synthetic Polypeptide

SEQ ID NO: 59 - RNA, 4027 nt, Artificial Sequence
  Synthetic Polynucleotide
gggaaauaagagagaaaagaagaguaagaagaaauauaagagccaccauggauuuagaagccgccaagaacggaaccgccuggcgucccaccagcgccgagggcgauuucgaacuuggcaucucaagcaaacaaaagaggaaaaaaacaaagaccgugaagaugauaggcguucucacccuguucagguacagcgauuggcaggauaagcuguucaugucccuggguacaauuauggccaucgcccauggcuccggccugccgcugaugaugaucguuuuuggagagaugaccgacaaauuuguggauaccgccgggaacuucucauucccugugaacuucagccugagccugcugaacccuggcaagauccuggaggaagagaugaccagauacgccuacuacuacucuggccugggugcgggaguccugguugccgcuuacauucaggugagcuuuuggacccuggccgccggcagacagauccguaaaaucaggcaaaaguucuuccacgccauccucagacaggaaaucggcugguucgacaucaaugacaccaccgagcugaacacaaggcugacagacgauaucucuaagaucucagaaggcaucggagauaaggugggcauguucuuccaggccgucgccaccuuuuucgccggcuucaucgugggcuucauccgcggauggaaacugacccuugugaucauggccaucagcccaauccugggccugagcgccgccgugugggccaagauccugucugcuuuuagcgacaaggagcuggccgcguacgcuaaggccggcgccguggccgaggaggcucugggcgccaucagaaccgugaucgcuuuugggggacaaaacaaggagcuggaacgguaccagaagcaccuggagaacgcuaaggagaucgggaucaagaaggccaucuccgcuaauaucagcauggggaucgccuucuuacugauauacgcuagcuacgcccuggccuuuugguacggcagcacccuggugauuuccaaggaguacaccauuggcaacgccaugaccguguucuucucuauccucaucggugcuuuuuccguuggccaggccgcccccugcaucgacgccuucgccaacgcuagaggcgccgccuacgucaucuucgauaucaucgacaacaauccaaagauugacagcuucagcgagcggggccauaagccagacucaaucaaggggaaccuugaauucaaugacguccauuucuccuaccccucucgagccaaugugaagauacugaaggggcugaaccugaaggugcaguccggucagaccguugcccuggugggcagcuccggaugugggaagucuaccaccguacaguugauccagcgacuguacgacccagacgaaggcaccaucaacauugauggccaggacauccggaauuuuaaugugaacuaccugagagagauuaucggcguggucucccaggaacccguccuguucuccacaacuaucgccgagaacaucuguuacggaagaggaaacgugaccauggacgagauaaagaaggccgucaaagaggcaaaugccuacgaguucauuaugaagcugccucagaaguucgacacccuggucggcgagagaggggcccagcugucugggggccagaagcagagaaucgccaucgccagggcucucguccggaaccccaagauucuccuccuggaugaggccaccagcgcccuggacaccgaaagcgaagccgagguccaggccgcccuggacaaggcccgagagggcaggaccaccaucgugaucgcccauagguugagcaccgugaggaaugccgacgugaucgcuggauucgaggacggcguuaucguggagcagggcucucacucggagcugaugaaaaaagagggcguguacuucaaacucgugaacaugcagacuuccggaucacagauccaguccgaggaguucgagcucaacgaugagaaggcugccacuagaauggcaccaaacggcuggaagucccgucuuuucagacacucuacgcagaagaaucugaagaacagccagaugugccagaagucucuggacguggaaacggacggccuggaagccaacgucccucccguguccuuccugaaaguccugaagcuaaacaaaacagaguggccuuacuuuguggugggcacuguuugcgccaucgccaacggcggccugcagccugcguucagcgugaucuuuagcgagauuauagcuauuuuuggcccuggagacgaugcugugaagcaacagaagugcaacaucuuuagucuuaucuuccuuuuccucggaaucaucagcuuuuucacguucuuccuucaggguuuuaccuuuggcaaggccggagagauacucacuagacgccugagaucaauggcuuuuaaggccaugcugagacaggacaugagcugguucgacgaccacaagaauucuaccggagcacuguccacaagacuggcaaccgacgccgcccagguccagggggccacuggcacccggcuggcccugaucgcucaaaacauugcaaaccugggaacuggcaucaucauuagcuucaucuauggauggcagcugacacuucugcugcuggccgucgugccaauuaucgccgugagcgggaucgucgagaugaaacuccucgcugggaaugcuaagagggacaagaaggagcuggaggccgcgggcaagaucgccacugaggcuaucgagaauauccgcaccguugugagcuugacacaggagagaaaguucgagagcauguauguggagaagcuguacggaccauacagaaauucagugcagaaggcccacaucuacggaauuaccuucuccaucagccaggcauucauguacuuuucuuacgccggcuguuuuagauucggcgcauaccugaucgugaacggccauaugagguucagagacgugauccugguuuucuccgccauaguguuuggcgcugucgcucugggccacgccagcucauuugcucccgauuaugcaaaggcaaagcuguccgccgcacaccucuucaugcucuucgagcgucagccucugaucgacuccuacucagaggaggggcucaagcccgacaaguucgaaggcaacaucacuuucaacgaagugguguucaacuacccuacccgggcaaacgugccugugcugcagggccugagccuggaggugaagaaaggacagacccuggcucugguaggcucauccggaugcggcaaaucaacaguggugcaacugcucgagcgguucuacgacccccuggcggggaccguucuccuggauggccaggaggcaaagaagcugaacgugcaguggcugagagcacagcuggggauugugucccaggaaccgauucuguuugacugcagcaucgccgagaacaucgccuacggagauaacagcaggguggugagccaggaugagaucgugagcgccgcaaaagccgccaacauccaccccuucauugagacccugccacacaaguacgagaccagagugggcgacaagggcacccagcugucaggaggacagaagcagcguaucgccaucgccagagcccugauucggcagccccagauucugcugcuggacgaggcuacaagcgcucuggacaccgaguccgaaaagguggugcaggaggcacuugacaaggccagagagggcagaaccugcauagugauugcccacagacugagcaccauucaaaacgccgaccugaucgugguuuuccagaaugggcggguuaaggagcauggcacccaccagcaacugcuggcccagaagggcaucuauuucagcauggugagcgugcaggccggcacacagaaucuggacuacaaggacgacgacgacaagugauaauaggcuggagccucgguggccaugcuucuugccccuugggccuccccccagccccuccuccccuuccugcacccguacccccguggucuuugaauaaagucugagugggcggc

SEQ ID NO: 60 - RNA, 3861 nt, Artificial Sequence
  Synthetic Polynucleotide
auggauuuagaagccgccaagaacggaaccgccuggcgucccaccagcgccgagggcgauuucgaacuuggcaucucaagcaaacaaaagaggaaaaaaacaaagaccgugaagaugauaggcguucucacccuguucagguacagcgauuggcaggauaagcuguucaugucccuggguacaauuauggccaucgcccauggcuccggccugccgcugaugaugaucguuuuuggagagaugaccgacaaauuuguggauaccgccgggaacuucucauucccugugaacuucagccugagccugcugaacccuggcaagauccuggaggaagagaugaccagauacgccuacuacuacucuggccugggugcgggaguccugguugccgcuuacauucaggugagcuuuuggacccuggccgccggcagacagauccguaaaaucaggcaaaaguucuuccacgccauccucagacaggaaaucggcugguucgacaucaaugacaccaccgagcugaacacaaggcugacagacgauaucucuaagaucucagaaggcaucggagauaaggugggcauguucuuccaggccgucgccaccuuuuucgccggcuucaucgugggcuucauccgcggauggaaacugacccuugugaucauggccaucagcccaauccugggccugagcgccgccgugugggccaagauccugucugcuuuuagcgacaaggagcuggccgcguacgcuaaggccggcgccguggccgaggaggcucugggcgccaucagaaccgugaucgcuuuugggggacaaaacaaggagcuggaacgguaccagaagcaccuggagaacgcuaaggagaucgggaucaagaaggccaucuccgcuaauaucagcauggggaucgccuucuuacugauauacgcuagcuacgcccuggccuuuugguacggcagcacccuggugauuuccaaggaguacaccauuggcaacgccaugaccguguucuucucuauccucaucggugcuuuuuccguuggccaggccgcccccugcaucgacgccuucgccaacgcuagaggcgccgccuacgucaucuucgauaucaucgacaacaauccaaagauugacagcuucagcgagcggggccauaagccagacucaaucaaggggaaccuugaauucaaugacguccauuucuccuaccccucucgagccaaugugaagauacugaaggggcugaaccugaaggugcaguccggucagaccguugcccuggugggcagcuccggaugugggaagucuaccaccguacaguugauccagcgacuguacgacccagacgaaggcaccaucaacauugauggccaggacauccggaauuuuaaugugaacuaccugagagagauuaucggcguggucucccaggaacccguccuguucuccacaacuaucgccgagaacaucuguuacggaagaggaaacgugaccauggacgagauaaagaaggccgucaaagaggcaaaugccuacgaguucauuaugaagcugccucagaaguucgacacccuggucggcgagagaggggcccagcugucugggggccagaagcagagaaucgccaucgccagggcucucguccggaaccccaagauucuccuccuggaugaggccaccagcgcccuggacaccgaaagcgaagccgagguccaggccgcccuggacaaggcccgagagggcaggaccaccaucgugaucgcccauagguugagcaccgugaggaaugccgacgugaucgcuggauucgaggacggcguuaucguggagcagggcucucacucggagcugaugaaaaaagagggcguguacuucaaacucgugaacaugcagacuuccggaucacagauccaguccgaggaguucgagcucaacgaugagaaggcugccacuagaauggcaccaaacggcuggaagucccgucuuuucagacacucuacgcagaagaaucugaagaacagccagaugugccagaagucucuggacguggaaacggacggccuggaagccaacgucccucccguguccuuccugaaaguccugaagcuaaacaaaacagaguggccuuacuuuguggugggcacuguuugcgccaucgccaacggcggccugcagccugcguucagcgugaucuuuagcgagauuauagcuauuuuuggcccuggagacgaugcugugaagcaacagaagugcaacaucuuuagucuuaucuuccuuuuccucggaaucaucagcuuuuucacguucuuccuucaggguuuuaccuuuggcaaggccggagagauacucacuagacgccugagaucaauggcuuuuaaggccaugcugagacaggacaugagcugguucgacgaccacaagaauucuaccggagcacuguccacaagacuggcaaccgacgccgcccagguccagggggccacuggcacccggcuggcccugaucgcucaaaacauugcaaaccugggaacuggcaucaucauuagcuucaucuauggauggcagcugacacuucugcugcuggccgucgugccaauuaucgccgugagcgggaucgucgagaugaaacuccucgcugggaaugcuaagagggacaagaaggagcuggaggccgcgggcaagaucgccacugaggcuaucgagaauauccgcaccguugugagcuugacacaggagagaaaguucgagagcauguauguggagaagcuguacggaccauacagaaauucagugcagaaggcccacaucuacggaauuaccuucuccaucagccaggcauucauguacuuuucuuacgccggcuguuuuagauucggcgcauaccugaucgugaacggccauaugagguucagagacgugauccugguuuucuccgccauaguguuuggcgcugucgcucugggccacgccagcucauuugcucccgauuaugcaaaggcaaagcuguccgccgcacaccucuucaugcucuucgagcgucagccucugaucgacuccuacucagaggaggggcucaagcccgacaaguucgaaggcaacaucacuuucaacgaagugguguucaacuacccuacccgggcaaacgugccugugcugcagggccugagccuggaggugaagaaaggacagacccuggcucugguaggcucauccggaugcggcaaaucaacaguggugcaacugcucgagcgguucuacgacccccuggcggggaccguucuccuggauggccaggaggcaaagaagcugaacgugcaguggcugagagcacagcuggggauugugucccaggaaccgauucuguuugacugcagcaucgccgagaacaucgccuacggagauaacagcaggguggugagccaggaugagaucgugagcgccgcaaaagccgccaacauccaccccuucauugagacccugccacacaaguacgagaccagagugggcgacaagggcacccagcugucaggaggacagaagcagcguaucgccaucgccagagcccugauucggcagccccagauucugcugcuggacgaggcuacaagcgcucuggacaccgaguccgaaaagguggugcaggaggcacuugacaaggccagagagggcagaaccugcauagugauugcccacagacugagcaccauucaaaacgccgaccugaucgugguuuuccagaaugggcggguuaaggagcauggcacccaccagcaacugcuggcccagaagggcaucuauuucagcauggugagcgugcaggccggcacacagaaucuggacuacaaggacgacgacgacaag

SEQ ID NO: 61 - protein, 1287 aa, Artificial Sequence; identical to SEQ ID NO: 49
  Synthetic Polypeptide

SEQ ID NO: 62 - RNA, 4003 nt, Artificial Sequence
  Synthetic Polynucleotide
gggaaauaagagagaaaagaagaguaagaagaaauauaagagccaccauggaccuggaggcagccaagaacggcaccgcuuggaggccgacaucagccgagggagacuucgaacugggaaucuccaguaaacaaaagagaaagaagaccaagacagugaaaaugaucggagugcugacacuguucagguacuccgacuggcaggacaagcucuuuaugucccucggcaccaucauggccauugcucacggcagcggccugccuuuaaugaugaucguuuucggggagaugaccgacaaauucguggauacagccggaaacuucucguuccccgugaacuuuagccugagccugcugaauccugggaaaauccuggaggaggaaaugaccagguacgccuacuacuacagcggccugggggcuggcgugcugguggccgccuacauccagguguccuucuggacucuggccgccggcagacagaucaggaagaucagacagaaguucuuccacgcuauucugaggcaggaaauugggugguucgacaucaacgacacuaccgagcuuaacacgagacugaccgacgacauuagcaagaucucugaaggcaucggugauaaggugggcauguucuuccaagccguggccaccuuuuucgcaggguucaucgugggauuuauccggggcuggaagcuuacccuggucaucauggcuaucagcccgauucugggccucagcgccgcaguuugggccaagauccuguccgcuuucuccgacaaggagcucgccgccuacgccaaggcuggugcaguggcugaggaggcccuuggagccauucguaccgugaucgccuuuggcggccagaacaaagagcuagagagauaccaaaaacacuuggagaacgccaaggagaucggcauuaagaaggccaucucugccaacauuuccauggggaucgccuuccugcugaucuacgccagcuacgcccuggcuuuuugguacggcaguacgcuggugauuagcaaggaguacaccaucggcaacgccaugaccguguuuuucuccauucucaucggagcauucuccgugggccaggcugcccccugcaucgacgcguucgccaaugccagaggcgccgccuaugugauuuucgacaucaucgacaauaacccaaagaucgacaguuucucugaacguggacacaaaccagacagcaucaaaggaaaucuggaguucaacgacgugcacuucagcuacccauccagggccaacgugaagauucugaagggcuuaaaccugaaggugcagaguggacagaccguggcccugguggggucuucuggcugcggcaagagcaccaccgugcagcucauucagagacuuuaugaccccgaugagggcacuauaaacaucgauggccaggacaucaggaacuucaaugugaacuacuuaagggaaauuaucggcguggugagccaggagcccgugcuguucucuaccacgauugcagagaauaucugcuacgggagaggcaacgugaccauggacgaaaucaaaaaagcuguaaaagaggcuaacgcuuacgaguucauuaugaaacuaccccagaaguucgauacccucgugggggagaggggugcacagcugagcgguggccagaagcagaggaucgccauagcaagagcccuggugagaaaccccaaaauccuccuuuuggaugaggccaccuccgcccucgacaccgagagcgaagccgaggugcaggccgcccucgacaaggccagggagggccgcaccaccauugugaucgcccacaggcugagcaccgugagaaacgccgacgugauugccggauucgaggacggcgugaucguggagcagggcagccacagcgagcucaugaaaaaggaaggcgucuacuucaaacuggugaauaugcagaccucggguagccaaauccaguccgaggaguuugaguuaaacgacgagaaggccgccacccggauggcccccaauggguggaagagccgccuguuuaggcacucaacccaaaagaaccugaagaacucccagaugugucagaaaucacuggacguggaaaccgacgggcuggaagcuaacgugccucccgugaguuuccugaaggugcugaagcugaacaagacggaguggcccuauuuugucguuggaacagugugcgcaaucgccaacggcggccuccagccggcauuuagcgugauuuucagcgagaucaucgccauauucggcccuggggaugacgcugucaagcagcagaaaugcaacaucuucagccuaauauuucucuuucugggaauuaucagcuucuucaccuucuuccugcagggguuuaccuucggaaaagccggcgagauccucacccgcagacugagauccauggccuucaaggccaugcugaggcaggauauguccugguucgaugaccacaagaacagcaccggcgcccugagcaccaggcuggccacugaugccgcucagguccagggugcuacaggcacccgccuugcccugauugcccagaacauugcuaaccuggggaccgggaucaucaucagcuuuaucuacggguggcagcugacccucuuacugcuggccguggugccaaucaucgccgugagcgggaucguggagaugaagcugcuggccggaaaugcuaagagagauaagaaggagcuggaggccgccggaaagaucgccacagaggccaucgaaaacauuagaacuguagugagccugacccaggagagaaaguuugagagcauguacguggagaagcucuacggacccuacaggaacuccgugcagaaggcacacaucuacggcaucacuuucucgauuagccaggccuucauguacuuuagcuaugccgguugcuucagguuuggugcuuaccugaucgucaauggccacaugagguuuagagacgucauccugguguuuagcgccaucgucuucggagcuguggcucugggccacgccuccagcuucgccccugacuacgccaaggccaagcugagcgccgcccaucuguucaugcuguuugaacgucagccacugaucgacucauauagcgaggaagggcugaaacccgauaaauucgagggaaauauuacauucaaugagguuguauucaacuacccuaccagagccaacgugccugugcugcagggccugucccuggaggugaaaaagggacagacccuggcucuggugggcucuagcggcuguggcaagagcaccguggugcagcugcuggagagauuuuacgauccucuggccggcacagugcugcuggacggccaggaggcuaaaaaacugaaugugcaguggcugcgggcucaacugggcaucgugucccaggagcccauacuguucgauuguagcaucgccgaaaauauugccuacggagacaauagcagagugguuucacaagaugagauuguaagugccgccaaggccgccaacauccaccccuucaucgaaacacucccccacaaguacgagacaaggguuggagauaagggcacccagcuguccgguggccagaaacagagaaucgccaucgcccgggcucugaucagacagccucagauccuccuguuggacgaggcuacuuccgccuuggacaccgaaucggagaaaguggugcaggaggcccucgacaaggcuagagagggaagaaccuguauugugaucgcgcauaggcucagcaccauccagaaugccgaucugaucgucguguuccaaaacggacgcgugaaggagcacggcacccaccagcaauugcucgcacagaaagggaucuacuucagcaugguguccgugcaggcaggcacccagaaucugugauaauaggcuggagccucgguggccaugcuucuugccccuugggccuccccccagccccuccuccccuuccugcacccguacccccguggucuuugaauaaagucugagugggcggc

SEQ ID NO: 63 - RNA, 3837 nt, Artificial Sequence
  Synthetic Polynucleotide
auggaccuggaggcagccaagaacggcaccgcuuggaggccgacaucagccgagggagacuucgaacugggaaucuccaguaaacaaaagagaaagaagaccaagacagugaaaaugaucggagugcugacacuguucagguacuccgacuggcaggacaagcucuuuaugucccucggcaccaucauggccauugcucacggcagcggccugccuuuaaugaugaucguuuucggggagaugaccgacaaauucguggauacagccggaaacuucucguuccccgugaacuuuagccugagccugcugaauccugggaaaauccuggaggaggaaaugaccagguacgccuacuacuacagcggccugggggcuggcgugcugguggccgccuacauccagguguccuucuggacucuggccgccggcagacagaucaggaagaucagacagaaguucuuccacgcuauucugaggcaggaaauugggugguucgacaucaacgacacuaccgagcuuaacacgagacugaccgacgacauuagcaagaucucugaaggcaucggugauaaggugggcauguucuuccaagccguggccaccuuuuucgcaggguucaucgugggauuuauccggggcuggaagcuuacccuggucaucauggcuaucagcccgauucugggccucagcgccgcaguuugggccaagauccuguccgcuuucuccgacaaggagcucgccgccuacgccaaggcuggugcaguggcugaggaggcccuuggagccauucguaccgugaucgccuuuggcggccagaacaaagagcuagagagauaccaaaaacacuuggagaacgccaaggagaucggcauuaagaaggccaucucugccaacauuuccauggggaucgccuuccugcugaucuacgccagcuacgcccuggcuuuuugguacggcaguacgcuggugauuagcaaggaguacaccaucggcaacgccaugaccguguuuuucuccauucucaucggagcauucuccgugggccaggcugcccccugcaucgacgcguucgccaaugccagaggcgccgccuaugugauuuucgacaucaucgacaauaacccaaagaucgacaguuucucugaacguggacacaaaccagacagcaucaaaggaaaucuggaguucaacgacgugcacuucagcuacccauccagggccaacgugaagauucugaagggcuuaaaccugaaggugcagaguggacagaccguggcccugguggggucuucuggcugcggcaagagcaccaccgugcagcucauucagagacuuuaugaccccgaugagggcacuauaaacaucgauggccaggacaucaggaacuucaaugugaacuacuuaagggaaauuaucggcguggugagccaggagcccgugcuguucucuaccacgauugcagagaauaucugcuacgggagaggcaacgugaccauggacgaaaucaaaaaagcuguaaaagaggcuaacgcuuacgaguucauuaugaaacuaccccagaaguucgauacccucgugggggagaggggugcacagcugagcgguggccagaagcagaggaucgccauagcaagagcccuggugagaaaccccaaaauccuccuuuuggaugaggccaccuccgcccucgacaccgagagcgaagccgaggugcaggccgcccucgacaaggccagggagggccgcaccaccauugugaucgcccacaggcugagcaccgugagaaacgccgacgugauugccggauucgaggacggcgugaucguggagcagggcagccacagcgagcucaugaaaaaggaaggcgucuacuucaaacuggugaauaugcagaccucggguagccaaauccaguccgaggaguuugaguuaaacgacgagaaggccgccacccggauggcccccaauggguggaagagccgccuguuuaggcacucaacccaaaagaaccugaagaacucccagaugugucagaaaucacuggacguggaaaccgacgggcuggaagcuaacgugccucccgugaguuuccugaaggugcugaagcugaacaagacggaguggcccuauuuugucguuggaacagugugcgcaaucgccaacggcggccuccagccggcauuuagcgugauuuucagcgagaucaucgccauauucggcccuggggaugacgcugucaagcagcagaaaugcaacaucuucagccuaauauuucucuuucugggaauuaucagcuucuucaccuucuuccugcagggguuuaccuucggaaaagccggcgagauccucacccgcagacugagauccauggccuucaaggccaugcugaggcaggauauguccugguucgaugaccacaagaacagcaccggcgcccugagcaccaggcuggccacugaugccgcucagguccagggugcuacaggcacccgccuugcccugauugcccagaacauugcuaaccuggggaccgggaucaucaucagcuuuaucuacggguggcagcugacccucuuacugcuggccguggugccaaucaucgccgugagcgggaucguggagaugaagcugcuggccggaaaugcuaagagagauaagaaggagcuggaggccgccggaaagaucgccacagaggccaucgaaaacauuagaacuguagugagccugacccaggagagaaaguuugagagcauguacguggagaagcucuacggacccuacaggaacuccgugcagaaggcacacaucuacggcaucacuuucucgauuagccaggccuucauguacuuuagcuaugccgguugcuucagguuuggugcuuaccugaucgucaauggccacaugagguuuagagacgucauccugguguuuagcgccaucgucuucggagcuguggcucugggccacgccuccagcuucgccccugacuacgccaaggccaagcugagcgccgcccaucuguucaugcuguuugaacgucagccacugaucgacucauauagcgaggaagggcugaaacccgauaaauucgagggaaauauuacauucaaugagguuguauucaacuacccuaccagagccaacgugccugugcugcagggccugucccuggaggugaaaaagggacagacccuggcucuggugggcucuagcggcuguggcaagagcaccguggugcagcugcuggagagauuuuacgauccucuggccggcacagugcugcuggacggccaggaggcuaaaaaacugaaugugcaguggcugcgggcucaacugggcaucgugucccaggagcccauacuguucgauuguagcaucgccgaaaauauugccuacggagacaauagcagagugguuucacaagaugagauuguaagugccgccaaggccgccaacauccaccccuucaucgaaacacucccccacaaguacgagacaaggguuggagauaagggcacccagcuguccgguggccagaaacagagaaucgccaucgcccgggcucugaucagacagccucagauccuccuguuggacgaggcuacuuccgccuuggacaccgaaucggagaaaguggugcaggaggcccucgacaaggcuagagagggaagaaccuguauugugaucgcgcauaggcucagcaccauccagaaugccgaucugaucgucguguuccaaaacggacgcgugaaggagcacggcacccaccagcaauugcucgcacagaaagggaucuacuucagcaugguguccgugcaggcaggcacccagaaucug

SEQ ID NO: 64 - protein, 1279 aa, Artificial Sequence; identical to SEQ ID NO: 3
  Synthetic Polypeptide

SEQ ID NO: 65 - RNA, 4003 nt, Artificial Sequence
  Synthetic Polynucleotide
gggaaauaagagagaaaagaagaguaagaagaaauauaagagccaccauggaccuagaggccgcgaagaacggcaccgccuggagaccuaccuccgccgagggggacuucgaguuggguaucagcucuaaacagaagaggaagaaaaccaagacugugaaaaugauaggcgugcugacccucuucagauacuccgacuggcaggacaagcuguucaugucccucggcaccaucauggcuaucgcccauggaucuggacugccccuuaugaugaucguuuucggggagaugaccgacaaguucguggacaccgcaggaaacuucuccuuccccgugaacuucagcuugagccuguugaacccaggcaagauacucgaggaggagaugacccgcuacgccuacuacuacagcggccucggcgccggggugcugguggcagcuuauauccaggugagcuucuggacgcuggcugccggccgacagauucgcaagauccgccagaaauucuuccacgccauccuuaggcaggagaucggcugguucgauaucaacgacaccacagagcugaauacucggcuaaccgacgacauuagcaagaucagcgagggaaucggcgacaaggugggcauguuuuuccaagcuguggcuaccuucuucgccggcuucaucguaggauucauuagaggauggaagcugacccuggugaucauggcuaucagcccaaucuugggccuguccgcugccgugugggccaaaauucugucugcguuuucagauaaggagcuggccgccuacgccaaggcaggcgcugucgccgaggaggcucugggcgccaucagaacugugaucgccuucgguggacagaacaaggaguuggaaagauaucagaagcacuuggagaacgccaaggagaucggcaucaagaaggccaucucugccaauaucagcaugggcaucgcguuucugcugauuuacgccagcuacgcacuggccuucugguauggcucuaccuuggucaucagcaaggaguacaccaucggcaacgcuaugacuguguucuucuccauucugaucggcgcauucagcgugggacaggccgccccuugcaucgacgcuuucgccaacgccaggggcgccgccuacgucaucuuugacauuaucgacaacaaccccaaaaucgacucuuucagcgaaagaggccacaaacccgacuccaucaaggguaaccuggaguucaacgauguccauuucuccuacccuucuagggccaacgugaagauccugaagggccuaaaucugaaggugcagucaggacagaccgucgcucugguggguagcuccggcugcggcaaguccaccacagugcagcuuauccagagguuguaugacccugaugaaggcaccauuaauaucgacggccaggacaucaggaauuuuaaugugaauuaccugagagagauuaucggcguggucagccaggagcccguccuauucagcacaacaauagccgaaaacaucuguuauggcagggggaacgucacaauggaugagaucaagaaggccgugaaagaggcuaacgcauacgaauuuaucaugaagcucccucagaaguucgacacuuuggugggcgagagaggcgcccaacugagcggcggccagaagcagagaaucgcaaucgcuagagcccucguccggaauccaaagauccugcugcucgacgaggccacaagcgcucuugacaccgagucagaggccgaggugcaagcugcccuggacaaagcccgggagggcagaaccaccaucgugauugcccacaggcuguccaccguuagaaaugcggacgucaucgccggguucgaggacggggugauuguggagcagggcagccauagcgagcucaugaagaaggagggaguguacuucaagcuggucaauaugcagaccaguggcucucagauccagagcgaggaguucgagcugaacgacgagaaggccgccacuagaauggcccccaauggcuggaaaagcagacucuucagacacagcacgcagaagaaccugaagaacagucagaugugccagaagagucuggacgucgagaccgacggccuggaggccaacgugccccccgucaguuuccugaaggugcugaaacuaaacaaaacugaguggccuuacuucguuguaggaaccgucugcgcuaucgccaacgggggacugcagcccgccuuuagcgugaucuuuagcgaaaucaucgccaucuuuggccccggcgacgacgcugugaagcagcagaagugcaauaucuucucuuugaucuuucuguuccugggcaucaucucauucuuuacauuuuuucuccagggcuucaccuucggcaaggccggagagauucugaccagaagacugagaagcauggccuucaaggcuaugcugaggcaggacaugagcugguuugacgaucacaagaacagcacuggcgcccugagcacaagacuggcuaccgacgccgcacaggugcagggcgccaccgggacuagguuggcucugaucgcccagaauaucgccaaucugggcacuggcauuauuauuagcuucaucuauggcuggcagcugacccugcugcugcuggccguugugcccaucaucgcugugucaggcaucguggaaaugaagcuccucgcuggcaacgccaaaagggacaagaaggagcuggaggccgcaggcaagauugccaccgaggccaucgagaauauccgcaccgucgugagcuugacccaggaaagaaaguucgagagcauguacguagagaaacuguacggacccuaccgcaauuccguacagaaggcucauaucuacgggaucacuuuuuccaucucccaggccuucauguacuuuagcuacgccggcugcuuuagauucggugccuacuugaucgugaacggacacaugcgauucagagaugugauucugguguuuagcgcuauuguguucggcgccgucgcccucgggcacgccagcagcuucgcccccgacuacgcgaaggcuaagcucucagcugcgcaccuguucaugcuguucgagcgccagccccucaucgacuccuacagcgaagagggauuaaagccggauaaauucgagggcaacaucaccuuuaacgaggugguauuuaacuauccaacccgcgccaacgugccgguucugcaaggacucagccuugaggucaagaagggccagacccuugcgcucgucggcuccagcggcugcggcaaaagcaccgucgugcagcugcuggagagauucuaugacccccuggccgggacugugcugcuggacggccaggaggcuaagaagcugaacgugcaguggcuccgggcucagcugggaaucgugagccaggaaccgauacuguuugacugcagcaucgcugagaacaucgccuauggagauaacagcaggguggugucccaggaugaaauugugagcgcugccaaagccgccaacauccacccuuucaucgagacucugccccauaaguacgagaccagagugggcgacaaagguacacagcuguccggagggcagaagcagagaauugccaucgccagggccuugauuagacagccgcagauccuucugcuggacgaggccacuucugcccuggacaccgaauccgagaagguugugcaggaagcccuggacaaggcaagagagggccguaccugcaucgugaucgcccacagacugagcacgauccagaacgcagaucugaucgucguguuccagaacggaagaguuaaagagcaugggacacaccagcagcuccuggcucagaagggcaucuauuucuccauggugagcgugcaggccggcacccagaaccugugauaauaggcuggagccucgguggccaugcuucuugccccuugggccuccccccagccccuccuccccuuccugcacccguacccccguggucuuugaauaaagucugagugggcggc

SEQ ID NO: 66 - RNA, 3837 nt, Artificial Sequence
  Synthetic Polynucleotide
auggaccuagaggccgcgaagaacggcaccgccuggagaccuaccuccgccgagggggacuucgaguuggguaucagcucuaaacagaagaggaagaaaaccaagacugugaaaaugauaggcgugcugacccucuucagauacuccgacuggcaggacaagcuguucaugucccucggcaccaucauggcuaucgcccauggaucuggacugccccuuaugaugaucguuuucggggagaugaccgacaaguucguggacaccgcaggaaacuucuccuuccccgugaacuucagcuugagccuguugaacccaggcaagauacucgaggaggagaugacccgcuacgccuacuacuacagcggccucggcgccggggugcugguggcagcuuauauccaggugagcuucuggacgcuggcugccggccgacagauucgcaagauccgccagaaauucuuccacgccauccuuaggcaggagaucggcugguucgauaucaacgacaccacagagcugaauacucggcuaaccgacgacauuagcaagaucagcgagggaaucggcgacaaggugggcauguuuuuccaagcuguggcuaccuucuucgccggcuucaucguaggauucauuagaggauggaagcugacccuggugaucauggcuaucagcccaaucuugggccuguccgcugccgugugggccaaaauucugucugcguuuucagauaaggagcuggccgccuacgccaaggcaggcgcugucgccgaggaggcucugggcgccaucagaacugugaucgccuucgguggacagaacaaggaguuggaaagauaucagaagcacuuggagaacgccaaggagaucggcaucaagaaggccaucucugccaauaucagcaugggcaucgcguuucugcugauuuacgccagcuacgcacuggccuucugguauggcucuaccuuggucaucagcaaggaguacaccaucggcaacgcuaugacuguguucuucuccauucugaucggcgcauucagcgugggacaggccgccccuugcaucgacgcuuucgccaacgccaggggcgccgccuacgucaucuuugacauuaucgacaacaaccccaaaaucgacucuuucagcgaaagaggccacaaacccgacuccaucaaggguaaccuggaguucaacgauguccauuucuccuacccuucuagggccaacgugaagauccugaagggccuaaaucugaaggugcagucaggacagaccgucgcucugguggguagcuccggcugcggcaaguccaccacagugcagcuuauccagagguuguaugacccugaugaaggcaccauuaauaucgacggccaggacaucaggaauuuuaaugugaauuaccugagagagauuaucggcguggucagccaggagcccguccuauucagcacaacaauagccgaaaacaucuguuauggcagggggaacgucacaauggaugagaucaagaaggccgugaaagaggcuaacgcauacgaauuuaucaugaagcucccucagaaguucgacacuuuggugggcgagagaggcgcccaacugagcggcggccagaagcagagaaucgcaaucgcuagagcccucguccggaauccaaagauccugcugcucgacgaggccacaagcgcucuugacaccgagucagaggccgaggugcaagcugcccuggacaaagcccgggagggcagaaccaccaucgugauugcccacaggcuguccaccguuagaaaugcggacgucaucgccggguucgaggacggggugauuguggagcagggcagccauagcgagcucaugaagaaggagggaguguacuucaagcuggucaauaugcagaccaguggcucucagauccagagcgaggaguucgagcugaacgacgagaaggccgccacuagaauggcccccaauggcuggaaaagcagacucuucagacacagcacgcagaagaaccugaagaacagucagaugugccagaagagucuggacgucgagaccgacggccuggaggccaacgugccccccgucaguuuccugaaggugcugaaacuaaacaaaacugaguggccuuacuucguuguaggaaccgucugcgcuaucgccaacgggggacugcagcccgccuuuagcgugaucuuuagcgaaaucaucgccaucuuuggccccggcgacgacgcugugaagcagcagaagugcaauaucuucucuuugaucuuucuguuccugggcaucaucucauucuuuacauuuuuucuccagggcuucaccuucggcaaggccggagagauucugaccagaagacugagaagcauggccuucaaggcuaugcugaggcaggacaugagcugguuugacgaucacaagaacagcacuggcgcccugagcacaagacuggcuaccgacgccgcacaggugcagggcgccaccgggacuagguuggcucugaucgcccagaauaucgccaaucugggcacuggcauuauuauuagcuucaucuauggcuggcagcugacccugcugcugcuggccguugugcccaucaucgcugugucaggcaucguggaaaugaagcuccucgcuggcaacgccaaaagggacaagaaggagcuggaggccgcaggcaagauugccaccgaggccaucgagaauauccgcaccgucgugagcuugacccaggaaagaaaguucgagagcauguacguagagaaacuguacggacccuaccgcaauuccguacagaaggcucauaucuacgggaucacuuuuuccaucucccaggccuucauguacuuuagcuacgccggcugcuuuagauucggugccuacuugaucgugaacggacacaugcgauucagagaugugauucugguguuuagcgcuauuguguucggcgccgucgcccucgggcacgccagcagcuucgcccccgacuacgcgaaggcuaagcucucagcugcgcaccuguucaugcuguucgagcgccagccccucaucgacuccuacagcgaagagggauuaaagccggauaaauucgagggcaacaucaccuuuaacgaggugguauuuaacuauccaacccgcgccaacgugccgguucugcaaggacucagccuugaggucaagaagggccagacccuugcgcucgucggcuccagcggcugcggcaaaagcaccgucgugcagcugcuggagagauucuaugacccccuggccgggacugugcugcuggacggccaggaggcuaagaagcugaacgugcaguggcuccgggcucagcugggaaucgugagccaggaaccgauacuguuugacugcagcaucgcugagaacaucgccuauggagauaacagcaggguggugucccaggaugaaauugugagcgcugccaaagccgccaacauccacccuuucaucgagacucugccccauaaguacgagaccagagugggcgacaaagguacacagcuguccggagggcagaagcagagaauugccaucgccagggccuugauuagacagccgcagauccuucugcuggacgaggccacuucugcccuggacaccgaauccgagaagguugugcaggaagcccuggacaaggcaagagagggccguaccugcaucgugaucgcccacagacugagcacgauccagaacgcagaucugaucgucguguuccagaacggaagaguuaaagagcaugggacacaccagcagcuccuggcucagaagggcaucuauuucuccauggugagcgugcaggccggcacccagaaccug

SEQ ID NO: 67 - protein, 1279 aa, Artificial Sequence; identical to SEQ ID NO: 3
  Synthetic Polypeptide

SEQ ID NO: 68 - RNA, 3858 nt, Artificial Sequence
  Synthetic Polynucleotide
auggaucuggaggcagcgaagaacggcaccgccuggaggcccaccagcgccgagggcgacuucgagcugggcaucuccuccaagcagaagcgcaagaaaacaaagaccgucaaaaugauuggcgugcugacccucuuuagguauagcgacuggcaagacaagcucuucaugucccucgggaccaucauggccaucgcccacgguagcggccucccacucaugaugauuguguucggcgagaugaccgacaaauuuguggacacggccggcaauuucagcuuccccgucaacuucucccugucccugcugaaccccgguaagauccuggaggaagagaugaccagguaugcguauuauuauagcggccugggggccggggugcugguggcugccuacauccaggugagcuucuggacccuggccgccgguagacagaucaggaagaucaggcagaaguucuuccacgccauccugaggcaggaaaucgggugguucgacaucaacgacaccacggaacugaacaccaggcucaccgacgauaucagcaaaauauccgaaggcaucggcgacaaggugggcauguucuuccaggccguggccaccuuuuuugccggcuucaucgugggcuucauaagaggcuggaagcucacccucgucaucauggccaucagccccauccuggggcugagcgccgccgugugggccaagauccugagcgcauucagcgauaaggagcuggccgccuaugccaaggccggcgccguggccgaggaggcccugggcgccauuaggaccgugaucgcguucggcggucaaaauaaggaacucgagcgguaucagaagcaccuggagaaugcuaaagagauugggauaaaaaaggcgaucucagcuaacaucagcaugggcaucgccuuucuccugaucuacgccagcuacgcccuggccuucugguacgggagcacgcuggugaucucgaaggaauauaccaucgggaaugccaugaccguguucuucagcauccugaucggugccuucucagucggccaggccgcccccuguaucgacgcguucgccaacgcccgcggcgccgccuacgugaucuuugacaucauagacaacaaccccaagaucgacuccuuuagcgagcggggccacaagcccgacagcaucaaaggaaaucuggaguucaacgacgugcacuucagcuacccgucccgagccaacgugaagauccugaagggccugaaucugaaggugcagagcggccagaccgucgcccuggugggaaguuccggauguggcaagagcaccaccgugcagcugauccagaggcuguacgaccccgacgagggcaccaucaacaucgacggacaggacaucaggaacuucaacgugaacuaccugagggaaaucaucggcgucgugagccaagagccggugcucuucagcaccacgaucgccgagaacaucugcuaugggcgcggcaacgucaccauggaugaaaucaagaaggccgugaaggaagccaacgccuacgaguucaucaugaagcugccgcagaaauucgacacccuggugggcgagaggggcgcccagcugucgggcgggcagaaacagaggaucgccaucgcacgggcccuggugaggaauccgaagauccuccuccuggacgaggccaccucggccuuggacaccgaaagcgaggccgaagugcaggccgcccuggauaaggcccgcgagggucgcaccaccaucgucauagcccaccgccucagcaccgugaggaacgccgaugugaucgcgggcuucgaggacggcgugaucguggagcagggcagccauagcgagcucaugaagaaggagggcguguacuucaagcuggugaacaugcaaaccuccgggucccagauccaguccgaggaguucgaacucaacgaugagaaggccgcgaccaggauggccccgaacggguggaagagcaggcuguuuaggcacagcacccagaagaaccugaaaaacagccagaugugccagaagagccuggacgucgagaccgacggccuggaggccaacgucccucccgugucguuucugaaggugcugaagcugaauaagaccgaguggcccuacuucgugguggggaccgugugcgccaucgccaacggaggccuccagcccgccuucagcgugaucuuuagcgagaucaucgcgaucuuuggccccggcgacgacgcagugaagcaacagaaguguaacaucuucagccugauuuuccuguuccuggggauuaucagcuucuuuaccuuuuuccugcagggcuucaccuucggcaaggccggggagauucugaccaggagacugcggagcauggcuuucaaggccaugcugagacaagauaugagcugguuugacgaccacaagaacagcaccggagcccuguccacccggcuggccaccgacgccgcccagguacagggcgccaccggcaccaggcuggcgcugaucgcccagaacaucgccaaucugggcaccggcaucaucauauccuucaucuauggcuggcagcugacccuccugcugcuggccguggugcccaucaucgccgucagcggcaucguggagaugaagcugcuggccggcaaugccaaaagggacaagaaggagcuggaggccgccggcaagaucgcgacagaggccaucgaaaacauccgcaccguugugucccugacacaggaacggaaguucgaguccauguacguggagaagcuguaugggcccuaccggaacagcguccagaaggcccacaucuacggcaucaccuucagcaucagccaggccuucauguacuucagcuacgccggcuguuuccgguucggcgcuuaccugaucgugaauggccacaugagguucagggacgugauccugguguucagcgcgaucguguucggcgccguggcccuggggcacgccagcagcuucgcccccgacuacgccaaggccaagcucuccgccgcccaccuguucaugcuguucgagaggcagccccugaucgacagcuacagcgaggagggccugaaacccgauaaguucgaaggcaacaucaccuucaacgaggugguguucaacuaccccaccagggccaacgugcccguccugcaaggccugucccuggaggucaaaaagggccagacccuggcccugguggggucgagcggcuguggcaagagcaccguggugcagcuccucgagcgcuucuacgauccccuggccggcacgguguucguggacuucggauuccagcuucuggacggccaagaagccaagaagcugaacguccaguggcugagggcccaacucggcaucguuagccaggagccgauccuguucgacuguagcaucgcggagaacaucgccuacggcgacaacagccgggucgucagccaggacgagauagugagcgccgccaaggcagccaacauacaucccuuuaucgagacccugccccacaaguaugagaccagggugggggacaagggcacccaacuuagcgggggccagaaacaaaggauagccaucgcccgggcccucaucaggcaaccacagauccugcuccuggacgaagcgacguccgcccuggacaccgaguccgagaaggucgugcaggaggcccuggacaaagccagggagggcaggacgugcaucgugaucgcccacaggcucagcacaauccaaaacgccgaccugaucgugguuuuccagaacgggcgcgucaaggagcacgguacccaccagcagcugcuggcgcagaagggcauuuacuucuccauggugagcguccaggccggcacgcagaaccug

SEQ ID NO: 69 - RNA, 3858 nt, Artificial Sequence
  Synthetic Polynucleotide
auggaccucgaggccgccaagaacggcaccgccuggaggcccacaucugccgagggggacuucgagcucgggauaagcagcaaacaaaagcgaaagaagaccaaaaccgugaagaugaucggcgugcucacccuguuccgauacagcgacuggcaggacaagcuguucaugucccugggcacgaucauggccaucgcccacggcagcgggcugccccugaugaugaucguguucggcgaaaugaccgacaaguuuguggacaccgccggcaacuucagcuuccccgugaauuucucccugagccugcugaaccccggcaaaauccucgaggaggaaaugaccagguacgcguacuacuauagcggccugggcgcgggagugcugguggccgccuacauccaagugagcuuuuggacacucgccgcgggcaggcaaauccggaagauacgucagaaguuuuuccaugcuauccugcggcaggaaaucggcugguucgacaucaacgacaccaccgagcucaacaccagacugaccgaugacaucagcaagaucagcgaaggaaucggcgacaaggucggcauguuuuuucaggcgguggccaccuuuuucgccggcuucaucgucggguucaucaggggcuggaaacugacccuggucauaauggccauuagccccauccucggccugagcgccgccgugugggccaagauccugucggccuucuccgacaaggagcuggccgccuacgccaaggccggcgccguggccgaggaggcccugggcgccauacggaccgugaucgccuuuggcgggcagaacaaggaguuggagcgauaccagaagcaccuggagaaugccaaagagaucggcaucaagaaagccaucuccgccaacaucuccaugggcaucgccuuucugcucaucuacgccagcuacgcccuggcguucugguacggcaguacccuggucaucuccaaggaguacaccaucgggaacgccaugaccguguucuucuccauccugaucggcgccuuuucagugggccaggccgccccauguaucgaugccuucgccaacgccaggggagccgccuacgucaucuucgacaucaucgacaacaaccccaagaucgacagcuucagcgagcggggccacaaacccgauagcaucaaggggaaccuggaguucaacgaugugcacuuuagcuaccccuccagggccaacgugaagauccugaagggccucaaccugaagguccagagcgggcagaccguggcccucguggggucuagcggcugcggcaagagcaccacugugcagcugauccagcgccuguaugaccccgacgaggggacgaucaacaucgacgggcaggacauccgcaacuuuaacgugaacuaccugagggagaucaucgggguggugucucaggaacccgugcuguucaguacaaccaucgccgaaaacaucugcuauggcaggggcaaugugaccauggacgagaucaagaaggcagugaaggaggccaacgccuacgaguucaucaugaagcugccccagaaguucgacacgcuggugggggagaggggcgcccagcugagcgggggccagaaacagcgcauagccaucgcccgggcacuggugcggaaccccaagauccugcuccuggaugaggcaaccuccgcccucgacaccgagagcgaggccgagguccaagccgcccuggauaaggccagggagggccgaaccaccauagugaucgcccaccgccugagcacgguccggaacgccgaugugaucgccggguuugaggacggcgugaucguagaacaggggucccauagcgagcuuaugaagaaggaggggguguacuucaagcuggugaacaugcagaccagcggaucccagauccagagcgaagaguucgagcucaacgacgagaaggccgccaccaggauggcccccaacggcuggaagagcaggcuauucaggcacagcacccagaagaaccugaaaaacagccagaugugccagaaaagccuggacgucgagaccgacggccuggaggccaacgugccccccguguccuuccugaagguucugaaacugaauaagaccgaguggccguauuucgucgucgggaccgugugugccaucgccaacgggggccugcagcccgccuucuccgugaucuucuccgagaucauugcaaucuucgggcccggagacgacgccgugaagcagcagaaaugcaacaucuucagccugaucuuccuguuccugggcauaaucuccuucuuuaccuuuuuccugcagggguucaccuucgguaaggccggcgagauucugaccaggaggcugagauccauggccuucaaggccaugcugaggcaagauaugagcugguucgacgaccacaagaacagcacgggcgcccugagcacccgucucgccaccgacgcugcccaggugcagggcgccacgggcaccaggcuggcccucaucgcccagaacaucgccaaccugggcacgggcaucaucaucuccuuuaucuacggcuggcaacugacccugcuucugcuggccguggugcccaucauagccgugaguggcaucguggagaugaagcuacucgccggcaacgccaagagggacaagaaggagcucgaggccgcgggcaagaucgccaccgaggcaaucgagaacauucggaccguggugagccugacgcaggagaggaaguucgagagcauguacguggagaaacuguacggccccuacaggaauagcgugcagaaggcccacaucuacggcauaaccuucagcauaagccaggcguucauguacuucagcuaugcuggcuguuucagguucggcgccuaucugaucgugaacggucacaugagguuucgcgacgucauccugguguuuagcgccaucguguucggggccguggcccuggggcacgccuccagcuucgcccccgacuacgccaaggccaagcugagcgccgcccaccuguucaugcucuucgagcgccagccccugauugacagcuacagcgaggagggccugaagcccgacaaguucgagggcaacaucaccuucaacgaagucguguucaacuaucccacccgggccaacgugccagugcugcaggggcugucccuggaagugaagaaggggcagacucucgcccuggucgggagcuccgggugcggcaagagcaccguggugcaacugcuggaaagguucuacgacccccuagccggcaccguguuuguggacuucggcuuccaacugcucgauggacaggaggccaagaagcugaacgugcaauggcugagggcucagcugggcaucgugagccaggagcccauccucuucgacugcagcaucgccgagaacauugccuauggagacaacucccgcguagugagccaggaugagaucgugagcgccgccaaggccgccaacauccaccccuucaucgaaacccugccccacaaauacgagaccagggugggcgauaaaggcacccagcugagcgggggccagaagcaaagaaucgccaucgcccgcgcccucauccgucagccccagauccugcugcuggacgaggcuaccucggcccuggauaccgagagcgaaaagguggugcaagaggcccuagacaaggccagggaaggcaggaccugcaucgugaucgcacaucggcugagcacuauccagaacgccgaucugaucguggucuuccagaacggccgcgugaaggagcacggaacgcaucagcagcugcuggcccagaagggcaucuacuucagcauggugagcguccaggccggcacccaaaaccug

SEQ ID NO: 70 - RNA, 3858 nt, Artificial Sequence
  Synthetic Polynucleotide
auggaccuggaggccgcgaagaacggcaccgcuuggaggccgaccagcgccgagggggacuuugagcuugggaucagcagcaagcaaaagcgcaagaagaccaagaccgugaagaugaucggagugcugacacuguucagguacagcgacuggcaggauaaacuguucaugucccugggcaccaucauggcgaucgcacacgguucaggccugccacugaugaugaucguguucggcgagaugaccgacaaguucgucgacaccgccggcaacuucagcuuucccgugaacuuuucacugagccuacugaacccaggcaagauccuggaggaggagaugaccagguacgccuacuacuacagcggccugggggccggcguguugguggccgccuacauccaaguguccuucuggacucuggccgcgggcaggcagauccgaaagaucaggcagaaguucuuucaugccauccugcgccaggagauaggcugguuugacauuaacgacacuaccgagcugaacaccaggcugaccgacgacaucagcaagaucagcgaggggauaggugacaagguagggauguucuuucaggcgguggccaccuucuucgccggauucaucgucggauucauccggggcuggaagcugacccucgugauaauggccauaucccccauccugggucugagcgccgccgugugggcaaagauccugagcgccuucagcgauaaggagcuggccgccuacgcaaaggccggcgccgucgccgaagaggcccucggcgccauaaggaccgugaucgccuucggugggcaaaacaaggagcuggagagguaccagaagcaccuggagaacgccaaggagaucggcauaaagaaggccaucagcgccaacaucucgauggguaucgccuuccugcugaucuaugccagcuacgcgcuggccuucugguauggaucgacccucgugaucagcaaggaguacaccaucggcaaugccaugaccguguucuucuccauccugaucggggccuuuuccgugggccaagccgcccccuguaucgacgccuucgcgaaugccaggggggccgccuaugugaucuucgacauaaucgacaauaaccccaaaauugacucuuucagcgagcguggacacaagccagacagcaucaagggcaaccuggaguucaacgacgugcauuucuccuaucccagccgagccaacguaaagauucucaagggccugaaccugaaggugcagagcgggcagaccguggcccucgugggcaguagcggcugcggcaaaagcaccaccguccagcugauccagcgucuguacgaccccgacgaaggcaccaucaacaucgauggccaagacaucaggaacuucaacgugaacuaucugcgcgagaucaucggcguggugagccaggagcccguccuguucagcaccaccaucgccgaaaacaucugcuacggucgcgguaacgugaccauggacgagaucaaaaaggccgucaaggaggccaacgccuacgaguucaucaugaagcugccccagaaguucgacacccucgugggcgagcggggggcccagcugucgggugggcagaagcagcggaucgccaucgcccgggcgcuggucaggaacccaaagauccugcuguuggaugaggccaccagcgcccucgacacagagucggaggccgaggugcaggccgcgcucgacaaggcgcgugaagggcggacgaccaucgugauugcccacaggcucuccacggugcgaaacgccgacgugaucgcaggcuucgaggauggagucaucguggagcaggguagccacuccgaauugaugaagaaggaggggguguacuuuaaacuggugaacaugcagaccagcggcucccagauccaguccgaggaguucgaacugaacgaugagaaggcggccacccggauggcccccaacggcuggaagucacgacuguucaggcacagcacgcaaaagaaccugaagaacucccagaugugucagaagagccuggacguggaaaccgacgggcuggaggcgaauguuccccccgugagcuuccugaaggugcugaagcugaacaagaccgaguggcccuacuucgugguggggaccgugugcgccaucgccaacgggggccugcagcccgccuuuuccgucauuuucagcgagaucaucgccaucuucggccccggcgaugaugcggugaaacagcagaaguguaauaucuucagccugaucuuccuguuccuggguauaaucuccuucuucaccuucuuccugcagggcuucaccuucggcaaggccggcgagauccugaccaggcgucugcguagcauggccuucaaggccaugcugaggcaagacauguccugguucgacgaccauaagaacagcaccggcgcccugagcaccaggcuggccaccgacgccgcccaggugcaaggcgccaccgggacccggcuggcccugaucgcccagaacauagccaaucugggcaccggcaucaucaucuccuucaucuacggguggcagcugacccugcugcugcuggccguggugccaaucaucgccguguccgggaucguggagaugaagcugcuggccggcaacgccaagagggauaagaaagaacuggaggccgccggcaagaucgccaccgaggccaucgagaacaucaggaccguggugucccugacccaggagaggaaguucgaguccauguacguugagaagcuguacggccccuaccgaaacuccgugcagaaggcccacaucuacggcaucaccuucagcaucagccaggccuucauguacuucagcuacgcgggcuguuucagguucggggccuaccugaucgucaacgggcauaugagauucagggacgugauacugguguucagcgccaucguguucggcgccguagcccucggccacgccagcuccuucgcccccgacuacgcgaaggccaagcugagcgccgcgcaccuguuuaugcuguuugagcgccagccccucaucgacagcuauagcgaggagggccugaaacccgacaaguucgagggcaacaucaccuucaacgaggugguguucaacuacccgacgcgcgcgaacgugcccgugcugcagggucugagccuggaggugaagaagggccaaacccuggcccuggugggcuccagcgggugcggcaagucgaccgucguccagcugcuggagagauucuaugauccccucgccgguaccgucuuuguggacuucggcuuccaacugcuggacggccaggaggccaagaagcugaacgugcaguggcugcgggcccaguuggguauugugucccaggagcccauccuguucgacugcagcauagccgaaaacaucgccuacggcgacaacagcagggucgugagccaggacgaaaucgugucggcggccaaagccgccaacauccaccccuucaucgagacccugccccacaaguacgagacccgggugggcgacaagggcacccagcucagcggcggccagaagcagcgcauugccaucgccagggcacugaucaggcagccccagauccugcugcuggacgaggccaccagcgcccuggauaccgagagcgagaagguuguucaagaggcccuggacaaggccagggagggccggacgugcaucgugaucgcccaccggcugagcacgauccaaaacgcggaccucauugugguauuccagaacggccgggugaaggaacacggcacccaccagcagcugcucgcccagaagggcaucuacuucuccaugguguccgugcaggcagggacccagaaccug

SEQ ID NO: 71 - RNA, 3858 nt, Artificial Sequence
  Synthetic Polynucleotide
auggaccuggaagccgcgaagaacggaaccgccuggaggcccaccagcgccgagggcgacuucgagcuggggaucagcuccaagcagaagaggaagaagaccaagacggugaagaugaucggaguucugacccuguuccgguauagcgacuggcaggacaagcuguuuaugucgcugggcaccaucauggccaucgcccacggcucuggccucccgcugaugaugaucguauuuggcgagaugaccgauaaguucguagacaccgccggcaacuucagcuucccagugaacuucagccugagccugcugaauccaggcaagauccuggaagaagagaugacccgguacgcguacuacuacuccgggcugggcgccggcgugcugguggccgccuacauccaggugagcuucuggacucuagccgccggccgacaaauaaggaagauccgccagaaguuuuuccaugccauccugcgucaagagauaggcugguucgacaucaaugacaccaccgaacucaacaccaggcugacggacgauaucagcaaaaucucugagggcaucggggacaaggugggcauguuuuuccaggccgucgccaccuucuucgccggguucaucgucggcuucaucaggggcuggaagcugacccuggugauaauggccaucagccccauccugggccugagcgcggccgugugggccaagauccugagcgccuucucggauaaggagcuggccgccuaugccaaggccggcgccgucgccgaggaggcacugggugccauccggaccgugaucgccuucgguggccagaacaaggaacucgagcgcuaccagaagcaccuggagaacgccaaagagaucggcaucaagaaggcgaucagcgcuaacaucagcauggggaucgccuuucugcugauauaugccuccuacgcccuggccuucugguauggcagcacccuggucaucagcaaggaguacaccaucggcaacgccaugacgguguucuucagcauccuuaucggugccuuuagcgugggccaggccgccccgugcaucgaugccuucgccaacgccaggggagccgccuaugucaucuucgacaucaucgacaacaaccccaagaucgacuccuucuccgagaggggccacaagcccgauagcaucaaggggaaccucgaguucaacgacguccacuucagcuaccccagcagggccaacgugaagauccucaaaggccucaaccugaaggugcaguccgggcagacgguggcccuugucgggagcagcggguguggcaaaagcaccaccguccagcugauccagaggcuguacgaucccgacgaaggaacgaucaauaucgacggccaagacaucaggaacuucaacgugaacuaucugcgcgaaaucaucgggguggugucccaggaacccgugcuguucuccacaaccaucgccgagaauaucuguuacggacggggcaaugugaccauggacgagauaaagaaggcggugaaagaggccaacgccuacgaguucaucaugaagcugccccagaaguucgacacccuggugggcgagaggggggcccagcugagcggggggcagaagcagaggauagccaucgccagggcgcuggugaggaauccgaagauccugcugcuggacgaggccaccucggcccuggacaccgagagugaggccgaggugcaggccgcgcuggacaaggcccgggagggcaggaccaccaucgugaucgcccaccggcugagcaccgugaggaaugcggacgugaucgccggcuucgaggacggcgugaucguggaacaggggucucauuccgagcucaugaagaaggaggggguguacuucaagcuggugaauaugcaaaccucugggucccagauccagucagaagaguucgaacugaacgaugagaaggccgccaccaggauggcccccaacggguggaagagccggcuguuccgccacaguacgcagaagaaccugaagaacagccagaugugccagaagagccuggauguggagaccgauggccuggaggccaacguacccccggugagcuuccugaagguccugaaacugaacaagacggaguggcccuacuucguugugggcacggugugcgccaucgccaacggcggccugcagcccgccuucagcgugaucuucagcgagaucaucgccaucuucgggccgggcgacgacgcggugaagcaacagaagugcaacaucuucucccugaucuuccucuuccucggcaucaucaguuucuucaccuucuuccuccagggguucacguucggcaaggccggcgagauccugaccaggaggcuccgaagcauggcguucaaagcuaugcugaggcaggacaugagcugguucgacgaccacaagaacuccaccggcgcccuguccaccaggcuggccaccgacgcggcccaggugcagggggccacuggcaccaggcuggcccugauugcccagaauauagccaaccugggcaccggaaucaucaucucauuuaucuauggguggcagcugacccugcuacugcuggcgguggugccgaucauugccgugagcggcaucguggagaugaagcugcuggccggcaaugccaagcgcgacaagaaggaacuggaagccgccggcaaaaucgcgaccgaggccaucgaaaacauccggaccguggucucccucacccaggagcgcaaguucgagagcauguacguggaaaagcuguacggcccguacaggaacagcguacagaaggcgcacaucuacggcaucacauucucaaucagccaggccuucauguacuucuccuacgccggguguuucagguucggggccuaucucaucgugaacggacacaugcgguuucgggaugugauccucguguucagcgccaucguguucggcgccguggcucugggccacgccagcagcuucgccccggacuacgccaaggccaagcugagcgccgcccaccuguucaugcuguucgagaggcagccccucaucgacagcuacucggaggaaggccugaagcccgacaaguuugaaggcaacaucaccuucaacgaggugguguuuaacuaccccacccgugccaacgugcccgugcugcagggccugagccuggaggugaaaaagggccaaacccuggcccuggugggcagcagcggguguggcaaauccaccguggugcagcugcucgagcguuucuacgacccccuggccggcaccgucuucgucgacuucggcuuccaacugcuggacggacaggaggccaagaagcucaaugugcaguggcugcgcgcccaacugggcaucgugucccaggaacccauccuguucgacugcagcaucgccgaaaacaucgcguacggcgacaacucccgcguggugagccaggacgagaucgucagcgccgccaaggccgcuaacauccaucccuuuaucgagacacucccccacaaguacgaaaccagagugggcgacaagggcacccagcugagcggcgggcagaagcaacgaauagccauagccagggcccugaucaggcagccccagauccuccugcucgacgaagccaccagcgcccuggacaccgagagcgaaaagguagugcaggaggcccuggacaaggccagggagggcaggacgugcaucgugaucgcccacaggcucaguaccauacagaacgcggaucucaucgugguguuccagaacggaagggucaaggaacacggcacccaccagcaacuccuggcccagaaggggauauacuucagcauggugagcgugcaggccgggacccaaaaccug

SEQ ID NO: 72 - RNA, 3858 nt, Artificial Sequence
  Synthetic Polynucleotide
auggaccuggaggccgccaagaacggcaccgccuggcgaccaaccuccgccgagggugauuucgagcucggcaucagcagcaagcagaagaggaagaagacaaagaccgugaaaaugaucggugugcugacccuguuuagguacagcgacuggcaagacaaacucuucaugucccuggggacgaucauggccaucgcccacggcagcggccugccccucaugaugaucgucuucggcgaaaugaccgacaaguucgucgacaccgccggcaacuucagcuuccccgugaauuucagccugucccugcucaaccccggcaagauccucgaggaggagaugacccgcuacgccuauuacuacuccggucugggggccggugugcugguggccgccuacauccaaguguccuuuuggacccucgccgcagguaggcagaucaggaagauccgccagaaguucuuccacgcgauccugcggcaggagaucggaugguucgacauaaacgacacuaccgagcugaacacccggcugaccgacgauaucuccaagaucuccgagggcauuggcgacaaggugggcauguucuuccaggccgucgccaccuucuuugcaggguucaucgugggcuuuaucaggggcuggaagcugacccuggucaucauggcgaucagccccauacugggccugagcgccgcggugugggcaaaaauccucagcgccuucuccgacaaggagcuagccgcauacgcgaaggccggggccguggccgaggaggcccugggcgccauccggaccgugaucgcguucggaggccagaacaaggagcucgaaagguaccagaagcaucuggagaacgccaaggagauaggcauaaagaaggccaucucagccaacauaagcaugggcaucgccuuccugcugaucuacgccagcuacgcccuggcuuuuugguauggcagcacccuggugaucuccaaggaauacacaaucggcaaugcaaugaccguguucuucuccauccugaucggcgccuucucugucggccaggccgcacccugcaucgacgccuucgccaacgcaaggggggccgccuacgucauauucgauaucaucgacaauaaccccaagaucgacuccuucagcgagaggggccacaagcccgacagcaucaagggcaaccuggaauucaacgacgugcacuucagcuaccccagcagagccaaugucaagauccugaagggccucaaccugaaggugcagagcggccaaaccguggcgcuggugggcagcagcggcugcgggaaaagcaccacgguccagcuaauccagaggcuguacgacccggacgaaggcacaaucaauaucgacgggcaggacaucaggaauuucaacgucaacuaccugagggaaaucauagguguggucagccaggagcccguccuguucagcaccacgaucgccgagaacaucugcuacggccgcggcaacgugaccauggacgagaucaagaaggccgugaaggaggccaacgccuacgaguuuaucaugaaacugccgcagaaguucgacacgcuggugggugagcggggggcccagcugagcggcggccaaaagcagcggaucgccaucgcccgugcccuggugcggaaccccaagauccucuugcuggaugaggccaccuccgcccuggacaccgaauccgaggccgaggugcaggccgcccuggauaaggccagggagggaaggacaaccauagugaucgcccacaggcugagcaccgugcggaacgccgacgugaucgccggcuucgaggacggggugauaguggagcaaggcucgcacuccgagcugaugaagaaggaaggcgucuacuucaaacuggugaacaugcagaccagcggcucccagauccaaagcgaggaguuugaacugaaugaugagaaggccgccacgaggauggcgccgaacggcuggaaauccagacuguucaggcacagcacccagaagaaccugaaaaacagccaaaugugccagaagagccucgacguggaaaccgacggccucgaagccaauguuccccccgugagcuuccugaaggugcucaaacucaacaagaccgaguggcccuacuuugugguggggaccgugugcgcgauagccaauggcggccuccagccagccuuuuccgucaucuuuuccgagaucauugccauauuugggccgggcgacgacgccgugaagcagcagaaaugcaacaucuucagccugaucuuccucuuucugggcaucauaagcuucuuuaccuuuuuccugcagggcuucaccuucgggaaggcgggcgagauccugaccaggcggcugagaagcauggccuucaaggccaugcugaggcaggacaugagcugguucgacgaccauaagaacagcaccggcgcccugagcaccaggcuggccaccgacgccgcccaggugcagggggccacggggacccggcuggcccugaucgcccagaacaucgccaaucugggcacggguaucaucaucucguucaucuacggcuggcagcugacgcugcugcugcuggcaguggugcccaucaucgccgugagcgggaucguggagaugaagcugcuggcgggcaacgccaagagggacaaaaaggaacuggaggccgccggcaaaaucgccacagaggccauugagaacaucaggaccguggugagccugacccaggagaggaaguucgagagcauguauguggaaaagcuguacggccccuaccggaauagcgugcagaaggcccacaucuacgggaucaccuucagcaucagccaggccuucauguacuucucguacgcgggcugcuuccguuucggugccuaccugaucgugaacgggcacaugagguuccgggacgucauccugguuuuuagcgccaucguguucggagccguggcccugggccacgccagcagcuucgccccggacuacgccaaagccaagcucagugccgcccaccuguucaugcuguucgagcggcaaccccucaucgacuccuacagcgaggagggccugaagcccgacaaguucgagggcaacaucaccuucaacgaggugguguuuaacuaccccacaagggcaaacgugcccgugcugcaggggcucucgcuggaggucaagaagggccaaacccuggcccugguggggagcagcgguugcggaaaauccaccgugguccagcugcucgagagguucuacgacccccuggcuggcaccguguucguggacuucggcuuccaacuccuggacggccaggaggccaaaaagcugaauguccaguggcugcgggcgcagcugggcaucgugucccaggagcccauccuguucgacugcagcaucgccgagaacaucgccuacggggacaacucgaggguggugucgcaggacgagaucgugagcgccgccaaggccgcaaauauccaucccuuuaucgagacgcugccccacaaguacgagaccagggugggcgacaagggcacccagcugagcggagggcagaagcagaggaucgccaucgccagggcccucaucaggcagccccagauccugcugcuggacgaggccacgagcgcccuggauaccgagagcgagaaggugguccaggaggcccuggacaaggccagggagggcaggaccugcauagugaucgcccaccggcugagcaccauccagaacgccgaucugaucgugguguuccaaaacggcagagugaaggaacacgguacccaccagcagcugcuggcccagaaggguaucuacuucuccauggugagcgugcaggcgggaacgcaaaaccug

SEQ ID NO: 73 - RNA, 3858 nt, Artificial Sequence
  Synthetic Polynucleotide
auggaccuggaggccgcgaagaacggcacagccuggcggcccaccagcgccgagggcgacuucgagcugggcauauccagcaagcagaagaggaagaagaccaagaccgugaaaaugaucggcguccugacccucuuccgauacuccgacuggcaggacaagcuguucaugucccucggcaccauaauggcgaucgcccacggcagcggccugccccugaugaugaucguguucggcgagaugaccgacaaguuuguggacaccgccggcaacuucucuuuccccgugaauuuuucccugagccugcugaaccccgggaagauccucgaggaggagaugaccagauacgccuacuacuacagcgggcugggagcaggcguccugguggccgccuacauucaggugagcuuuuggacccucgccgccggccggcagauccggaagauccggcaaaaguucuuucacgccauccugaggcaggagaucgguugguucgacaucaacgacaccaccgagcugaacacgaggcucaccgacgauaucagcaagaucuccgagggcaucggcgauaaggugggaauguucuuccaagccguggcgaccuucuucgccggcuucaucgugggcuucauccggggcuggaaacucacgcucgugaucauggccaucagccccauacuggggcugagcgccgccgugugggccaagauccucagcgcguucagcgacaaagaacuggccgccuacgcaaaggccggcgccguggccgaggaggcccugggggccauacgcaccgugaucgccuuuggcggccagaacaaggagcuugaaagguaucagaagcaucuggagaaugccaaggaaaucggcaucaaaaaggccaucagcgcaaacaucagcauggggaucgccuuccugcucauauacgccuccuacgcgcuggccuucugguacgggagcacgcucgugaucagcaaggaguacaccaucggcaacgcgaugaccguguucuucucaauacugaucggcgccuucagcgugggccaggccgcccccugcaucgacgccuuugcgaacgccaggggggccgccuacgugaucuuugacaucaucgauaauaaccccaagauugauucauucagcgagcguggacacaagcccgacuccauaaaaggcaaccucgaguucaacgaugugcacuuuagcuaucccuccagggccaaugugaaaauacugaagggccugaaucugaaggugcaaagcgggcagaccguagcccuggugggaagcagcgggugugggaagagcaccacgguccaacugauccagaggcucuaugaucccgacgaggggaccaucaacaucgacggccaggauaucaggaauuucaaugucaacuaccuaagggagaucaucgggguggugagccaggagcccguccuguuuagcaccaccauagccgagaacaucugcuaugggaggggcaacgugaccauggacgagaucaaaaaggccgugaaggaagccaacgccuacgaguuuaucaugaagcucccccagaaauucgacacccucgugggcgaacggggcgcccagcucagcgggggccagaagcagaggaucgccaucgcccgggcccuggugcggaaccccaagauccugcugcucgacgaggcaaccuccgcccuggacaccgaaagugaggccgaggugcaggcagcucuggacaaagccagggaaggccggaccaccaucgugaucgcccacaggcugagcaccgugcggaaugccgacgugaucgcgggcuucgaggacggggugaucgucgaacagggaagccacagcgaacucaugaagaaggagggcguguacuucaagcuggugaauaugcagacgagcggcagccagauccaaagcgaggaguucgagcugaacgacgagaaggccgccacccgcauggcccccaacggcuggaagagcaggcuguucaggcacagcacccagaagaaccucaagaacucacaaaugugccagaagucccuggauguggagaccgacggccucgaggcgaacgugccgcccgugaguuuucucaaagugcugaagcucaauaagaccgaguggccguacuucguggugggcaccgucugcgccaucgccaacggcggccugcagccggccuucucggucaucuuuagcgagaucaucgccaucuucggcccgggagacgacgccgugaagcagcagaagugcaacaucuucagccucauauuccuguuucugggcaucaucuccuucuucaccuucuuucugcagggguucaccuucggcaaggcgggcgagauccugaccaggcggcugcgcuccauggccuucaaggccaugcugaggcaggauaugucaugguucgacgaucacaagaacagcaccggcgcgcugucuaccaggcuggccaccgacgcagcccaggugcagggagccaccggcacccgccuggcccugaucgcgcagaauaucgccaaccugggcaccgggaucaucaucagcuuuauuuacggcuggcagcugacccuccugcugcuggccguggugcccaucaucgccgugagcggaaucguggagaugaaacugcuggccggcaacgccaagcgcgauaagaaggaacuggaggccgccggcaagaucgccaccgaggccaucgagaacaucaggaccguggugagccugacccaggagaggaaguucgaguccauguacguggagaagcuguacggccccuaccgcaacuccgugcagaaggcccacaucuacggcaucaccuucucuaucucgcaggccuucauguacuucagcuacgccgguugcuucagauucggcgccuaccugauagugaacggacacaugagguuuagggacgugauccugguguuuucagccaucguauuuggggcaguggcccucggccaugccagcagcuucgccccggacuacgccaaggccaagcugucagccgcccaccuguucaugcuguucgagcgacaaccccugaucgacagcuauuccgaagagggccugaaacccgauaaguucgagggcaacaucacguucaacgaggugguguucaauuaucccaccagggccaacgugcccgugcugcagggccugagccuggagguaaagaagggccagacccuggcacucgucggcagcuccgggugcggcaagagcaccgucgugcagcugcuggaaagguucuacgacccccuggccgggaccguguuuguggacuucggcuuccagcugcucgacggccaggaggccaagaaacugaacgugcaguggcuucgggcccaacugggcaucgugucucaggagcccauccuguucgacugcaguaucgccgagaacaucgccuacggcgacaacagcaggguggugucccaggacgagaucguguccgccgccaaggccgccaacauccaccccuucaucgagacccugccgcacaaguacgagacccgggucggcgacaaggguacccagcugagcggcggccagaagcagcggaucgccaucgcccgggcccugaucaggcaaccccagauccugcugcuggaugaagccaccagcgcccuggacaccgaguccgagaagguggugcaggaagcccuggacaaggccagggaaggccggacgugcauagugaucgcccaccggcugagcaccauccagaaugccgaccugaucgugguguuccagaauggaagggugaaggagcacgggacacaccagcagcugcuggcccagaagggcaucuacuuuuccauggucagcgugcaggccggcacacagaaucug

SEQ ID NO: 74 - RNA, 3858 nt, Artificial Sequence
  Synthetic Polynucleotide
auggaccuggaggccgccaaaaacggcaccgcguggcgaccgacguccgccgagggggacuucgagcucggcaucagcuccaagcagaagaggaaaaagaccaagacggugaagaugaucggcgugcugacccuguuccgguacagcgacuggcaggauaaacuguuuaugucccugggcaccaucauggccaucgcccacggcuccgggcugccucugaugaugaucgucuucggcgagaugaccgacaaguucguggacaccgcaggcaacuucuccuuucccgugaacuucuccuuaagccugcugaaccccggcaaaauccuggaggaggagaugacucgauaugccuacuacuacuccggccugggcgccggcgugcugguggccgccuacauucaggugucauucuggacccuggccgccgguaggcagauccguaagaucaggcaaaaguuuuuccacgccauccugaggcaggagauagggugguucgacaucaacgacaccacggagcucaauaccagacucacggaugacaucagcaagaucuccgagggcaucggcgacaagguugggauguucuuccaggccguggccaccuucuucgcgggcuuuaucgugggguuuauccgaggguggaagcugacacucgugaucauggccauaucccccauccuggggcucuccgccgccgugugggcgaagauccugagcgccuucuccgacaaggagcucgccgccuacgccaaggccggcgccguggcugaggaggcucugggcgcaauacgcacggugaucgccuucgggggccagaacaaggagcucgaaagguaccaaaaacaccuggagaaugcgaaggaaaucgggauaaagaaggccaucagcgccaacaucagcauggggaucgccuuccugcugauuuacgccuccuacgcccuggccuucugguacggcucgacccuggugaucagcaaggaguacaccaucgggaacgcgaugacgguguucuucagcauccucaucggggcguuuuccgucggccaagccgcuccgugcaucgacgccuucgccaacgcaaggggggcagccuacgucauuuucgacaucauagacaauaaccccaagauagauagcuucuccgagcggggccacaagcccgacagcaucaaaggcaaccuggaguuuaacgacgugcauuucucguacccgagcagggccaacgucaagauccucaagggccugaaucugaagguacaaagcgggcagaccgucgcccuaguggguuccagcgggugcggcaagagcaccaccgugcagcugauccagaggcuguacgaccccgacgaggggaccaucaacaucgacggacaggacauccggaacuucaacgugaacuaucuccgcgaaauuaucggcgugguaucccaagagcccguccuguucagcaccaccaucgcggaaaacaucuguuacgggaggggcaacgugaccauggacgagauaaagaaagccgucaaggaggccaacgccuacgaauuuaucaugaagcugccccaaaaguucgacacccuggugggggagaggggcgcccagcugagcggugggcagaaacagcggauagccauagcgcgugcccugguacggaaccccaagauccuccugcuggacgaggccaccuccgcccucgacaccgagagcgaggccgaggugcaggccgcccucgacaaggccagggaaggcaggacaaccaucgucaucgcucaccgccugagcaccgugcggaacgcggacgugaucgccggguucgaggacggcgugaucguggagcaggggagccacagcgagcugaugaaaaaggaggggguguacuucaagcuggucaacaugcagaccagcggcagccagauccagagugaggaguucgagcuaaacgacgagaaggcggccacccggauggcccccaacggcuggaagagcaggcuguucaggcacagcacccagaagaaccucaagaacagccagaugugccagaagagccuggacguggaaaccgacggccuggaggccaacguccccccugugagcuuccugaagguccucaagcugaacaagaccgaguggccuuacuucguggugggcaccgucugugccaucgccaacgggggucugcagccggccuucagcgugauauuuagcgaaaucauagccaucuucgguccgggcgacgacgccgucaagcaacagaagugcaacauauucagccugaucuuccuguuucugggcaucaucuccuucuucacguucuuccugcagggcuucaccuucggaaaggccggagagauccugacccgcaggcugaggagcauggccuuuaaggccaugcugcggcaggacaugagcugguucgacgaccacaagaacuccacaggcgcccuguccacgaggcucgccacggacgccgcgcaggugcagggggccaccggaacccggcuggcccugauugcgcagaauaucgcuaaccugggcaccggcaucauaaucagcuucaucuacggguggcagcugacccugcuccugcuggccgucguccccaucaucgccgugagcggcaucguggaaaugaagcuccuggccgggaacgcuaagagggacaagaaggaacuggaggccgccggcaagaucgccaccgaggccaucgagaacauacgaaccguggugagccugacccaggagcggaaguucgaguccauguacguggaaaagcuguaugggcccuacaggaacagcgugcagaaggcccacaucuauggaaucaccuuuagcauuagccaggccuucauguacuucagcuacgccggcugcuucagguucggcgccuaccucaucgucaacggucacaugagguuccgggacgugauccugguguuuagcgccauugucuucggggccgucgcccugggccacgccagcagcuucgccccugacuaugccaaggccaagcugagugccgcccaccuguucaugcuguuugaacggcagccgcucaucgacagcuacuccgaggagggccugaaacccgauaaauucgagggcaacaucaccuuuaacgagguuguguuuaauuaccccacacgggccaacguccccgugcugcagggucucagccucgaggugaagaagggccagacucuggcccuugucgguagcagcggcugcggcaaauccaccguggugcagcuccuggagagguucuacgauccccuugccggcaccguguucgucgacuucggcuuucagcugcuggaugggcaggaagccaagaagcugaacgugcaguggcugcgagcgcagcuggggaucgugucacaggagcccauccuguucgacugcagcaucgccgagaacaucgcuuacggagauaacagcaggguggugagccaggaugaaaucguguccgccgccaaggccgccaacauccaccccuucaucgagacccugccacacaaguacgagacccgggucggcgacaaagggacccagcucagcgggggucagaagcagagaaucgccaucgccagggcccucaucaggcagccccagauccuccugcuggacgaggccaccucggcccuggacaccgaguccgaaaaaguggugcaagaagcccuggacaaggcccgcgagggcaggaccugcauagugaucgcccaccgccugucaacuauccagaacgccgaccugaucgugguguuucagaauggcagggugaaggagcacggcacccaccagcagcucuuagcccaaaaagggaucuacuucagcauggucagcgugcaggcgggcacccagaaccug

SEQ ID NO: 75 - RNA, 3858 nt, Artificial Sequence
  Synthetic Polynucleotide
auggaccucgaagccgccaagaacgggaccgccuggcggcccaccagcgccgagggcgacuucgagcucggcaucagcagcaagcagaagaggaagaagaccaagacagucaagaugaucggagugcugacgcuguucagguacagcgauuggcaggacaaacucuucaugucccuggggacgauuauggccaucgcccacggcuccggccuuccccugaugaugaucguguucggcgaaaugaccgacaaguucgucgacaccgccggcaacuucagcuuccccgugaacuucagccugagucuccugaaccccggcaagauccuggaggaggagaugacccgcuacgccuacuacuauucgggacucggcgccggcgugcugguggcggccuacauccagguguccuucuggacccuggccgcuggcaggcagaucaggaagauacgccagaaguucuuccacgccauccugcgucaggagauaggaugguucgacaucaaugauacaaccgagcugaacaccaggcugaccgaugacaucagcaaaauauccgagggcauaggggacaaaguaggcauguucuuccaggccgucgccaccuucuucgcuggcuucaucgugggcuucauacgcggguggaagcugacccucgucaucauggcaaucucccccauccuggggcugagcgccgcggugugggccaagauccugagcgccuucucggacaaggagcuggccgcuuacgccaaggccggcgccguggccgaggaggcccugggggccauccggaccgugaucgccuucggcggccagaacaaggagcucgaaagguaccagaaacaccucgagaacgccaaggaaaucgggaucaaaaaggccaucucggccaacaucagcaugggcaucgccuuucugcugaucuacgccagcuaugcccuggccuucugguacggcagcacccucgucaucagcaaggaguauaccaucggcaaugccaugaccguguucuucagcauccugaucggagccuucagcgugggacaggccgcccccuguauugacgcuuucgccaacgcgagaggcgcggccuacgugaucuucgacaucaucgacaacaaccccaagaucgauagcuucagcgagagggggcacaagcccgauucaauuaaggggaaccuggaguucaacgacgugcacuucuccuacccgagccgcgccaaugugaaaauucucaagggccucaaccugaaagugcaguccggccagacaguggcccucguggggagcagcggaugugggaagagcaccacggugcaacugauccagagacucuacgaucccgacgagggcaccaucaacaucgacgggcaagacauccgcaacuucaacgucaacuaccugcgcgagaucauagggguggugagccaggaacccgugcuguucagcaccacgaucgcggagaacaucuguuacggcaggggcaacgugacgauggacgagaucaagaaggccgucaaggaggccaacgccuacgaguucaucaugaagcugccccagaaauucgacacccuggucggggagcgcggggcccagcugagcggcggccaaaaacagaggaucgccaucgcccgggcccucgucaggaacccaaagauccuccugcucgaugaggccaccagcgcccuggacaccgaaagugaggcagaggugcaggcagcccuggacaaggccagggagggcaggaccaccaucgugaucgcccaccggcugagcaccgugaggaacgcggacgugaucgccggcuucgaagacggcgugauagucgagcagggcucccacagcgagcugaugaagaaggagggcgucuauuucaagcucgucaacaugcagaccagcggcucccaaauccagagcgaagaguucgagcugaaugacgagaaggccgccaccaggauggccccgaacggguggaaauccaggcuguuucgccacuccacgcagaagaaccugaagaacagccagaugugucagaagagccuugaugucgagaccgacggccucgaagccaaugugccccccguaagcuuucugaagguccugaagcugaacaaaaccgaguggccguauuucguggucggaaccgugugugccaucgccaacgggggccuccagccggccuucagcgugaucuucagcgaaauuaucgcgauauuugggcccggcgacgacgcagugaagcagcagaagugcaacaucuucagccugauauuccucuuccucggcaucaucuccuucuuuaccuucuuucugcagggcuucaccuucgggaaggccggcgagauucugaccaggaggcugcgguccauggccuucaaggccaugcugcggcaggacauguccugguucgacgaccacaaaaacagcaccggcgcccugucgaccaggcuggccaccgacgccgcacaggugcagggcgccaccggcacccgccuggcacugaucgcccaaaacaucgccaaccucgggaccgggaucaucauuuccuuuaucuacggcuggcaacugacgcugcugcugcuggcuguggugccgauaaucgccgugucgggcaucguggagaugaaacugcuugccgggaacgcaaaaagggacaagaaggagcuggaggccgcgggcaagaucgccacugaggccaucgagaacaucaggaccguggugagccugacccaagagcgcaaguucgaaagcauguacguggaaaagcuguacggccccuaccggaacagugugcagaaggcgcacaucuacggcaucaccuucagcaucucccaggccuucauguacuucuccuacgccgggugcuucagguucggcgcuuaccugaucgugaauggacacaugagguucagggacgucauccugguguucagcgccaucguguucggcgccguggcccugggccacgccagcuccuucgcgcccgacuacgccaaggcaaagcugagcgccgcccaccuguucauguuguucgagcggcagccccucaucgacuccuacuccgaagaaggccugaaacccgacaaguucgagggcaauaucaccuucaacgaagugguguucaauuacccgacccgcgccaaugugcccgugcugcaggggcugagccucgaagugaagaagggccagacccuggcgcuggucggcuccuccggcugugguaaguccaccgucgugcagcugcuggaacgguucuaugacccccucgccgggaccguguucguggacuucggguuccaacugcuggacgggcaggaagccaagaagcugaacgugcaguggcugagggcccagcuggggaucgugagccaagaacccauccucuucgacuguuccaucgccgagaacaucgccuacggagacaauagcagggucgugagccaggacgagauagugagcgccgccaaggccgccaacauucaucccuucaucgagacccuaccccacaaguacgagacgagggugggagacaaggguacgcagcugagcgggggacagaaacagcgaaucgccaucgcccgggcccucauccggcagccgcagauccugcugcuggacgaagccacuagcgcccuggauaccgagagcgagaaaguggugcaggaggcgcuggacaaagcccgggagggcaggaccugcaucgugaucgcccacaggcucagcaccauccagaacgccgaccugaucgugguguuccagaauggccgggugaaagagcauggaacccaucagcagcugcuggcccagaaaggcaucuacuucaguaugguguccgugcaggcgggcacccaaaaccug

SEQ ID NO: 76 - RNA, 3858 nt, Artificial Sequence
  Synthetic Polynucleotide
auggaccuggaggccgccaagaacgggaccgccuggcgccccacuagcgccgagggcgacuucgagcugggcaucagcuccaagcaaaagcgcaagaaaaccaagaccgugaagaugaucggcgugcucacccuguuccgguacuccgauuggcaggacaagcuguucaugucccugggcaccaucauggcgauagcccacgguagcggccugccccugaugaugaucguguuuggcgagaugaccgacaaauucguggacaccgccggcaacuucagcuuccccgucaacuucagccugucccugcugaaccccggcaagauacuggaggaagagaugaccagguaugccuacuacuacagcggccucggggccggcgugcugguggccgcguacauacaggugagcuucuggacccuggccgcgggcaggcaaaucaggaagauccggcagaaauucuuucacgccauccuccgucaggaaaucggcugguuugacaucaaugacaccacugagcugaauacccgacugaccgacgacaucagcaagaucagcgagggcaucggggacaaagugggcauguucuuucaagccguggccacauuuuucgcgggcuucaucgucggcuucauucgcggcuggaagcugacccuuguaaucauggcaaucucucccauccugggccugagcgccgccgugugggccaagauccuguccgccuuuucagauaaggaacuggccgccuacgccaaggccggggccguagccgaagaggcccugggugccauacguacugugaucgccuuuggcggccagaacaaggagcuggagagguaccagaagcaccuggagaacgccaaggagaucggcauuaagaaagccaucagcgccaacaucuccauggggaucgccuuccugcugaucuaugccagcuacgcccuggccuucugguacggcagcacccuggugauaucaaaggaauacaccaucggcaacgccaugacgguguucuucuccauacugaucggcgccuuuagcgucggccaggccgccccgugcaucgacgccuucgccaacgccaggggcgcggccuacgucaucuucgauaucaucgacaacaaucccaagaucgacagcuucagcgagcggggccacaagcccgacagcauuaaaggcaaccuggaguucaacgacguccacuucuccuaucccaguagggcgaacgugaagauccugaagggccugaaccucaaggugcagagcggacagaccgucgcccuggugggcagcagcgggugcggcaagagcaccaccgugcagcuuauacagaggcuguacgacccugacgagggcaccaucaauaucgacggccaggacauccggaacuucaauguuaauuaucugagggagauaaucgguguggugagccaggagcccgugcuguucagcaccaccaucgccgagaacaucugcuacgggcggggcaacgugacgauggacgagaucaagaaggccgugaaggaggccaacgcuuacgaauucauuaugaaacugccccagaaguuugacacucuggucggagagcggggcgcccagcuaagcggcggccagaagcagcggaucgccaucgccagggcccucgugcgcaaccccaagauccuacugcuggacgaggccaccucggcccuggacacggagagcgaggcggaggugcaggccgcgcuggauaaagccagggaggggaggaccacgaucguuaucgcccaucggcugagcaccguacggaacgccgacgugaucgccgguuucgaggauggcgugaucguggaacagggcagccacuccgagcucaugaagaaggagggcguguauuuuaagcuggugaauaugcaaaccagcggcucccagauccagagcgaggaguucgagcugaacgacgagaaggccgccaccagaauggcccccaacggcuggaagucacgccucuuccgucauuccacccagaagaaucugaagaacagccagaugugccagaagucccuggaugucgagaccgacggccuggaggccaaugugccccccgugagcuuucugaaggugcugaagcuuaacaagacggaguggccauacuucgugguggggaccgugugugccaucgccaacggcggccuucagcccgccuuuagcgugaucuucuccgaaaucaucgccauauucggccccggcgacgacgccgugaagcaacagaagugcaacaucuucagccugaucuuccuguucuugggcauaaucagcuucuucaccuucuuccugcagggcuucacuuuuggcaaggccggagagauccugacccguagacugaggagcauggcguucaaggccaugcugcggcaggacaugagcugguucgacgaccauaagaauuccacgggcgcccugagcacccggcuggccaccgacgccgcccaggugcagggcgccaccggcacgaggcuggcccugaucgcacagaauaucgccaaccugggcaccgggaucaucaucagcuuuaucuacggcuggcaacugacccugcugcugcuggccgucgugcccaucauagccguguccggcaucguggagaugaagcugcuggccggcaacgccaagcgagacaagaaggagcuggaggccgccggcaagaucgcgaccgaggccaucgagaacauccguaccguggugucgcugacccaggagcggaaguucgaguccauguauguggagaagcuguacggccccuacaggaauagcgugcagaaggcccacauauacggaaucaccuucagcauuagccaagccuucauguacuucagcuacgccggcuguuuuagguucggcgccuaccucaucgucaauggccacaugagguuccgcgaugugauccugguguucuccgccaucgucuucggcgccgucgcccugggccacgcaagcuccuucgcccccgacuacgccaaggccaagcugucggcggcccaccuguucaugcuguucgagaggcagccccugaucgacuccuacagcgaggagggccugaaaccggacaaguuugagggcaacaucaccuucaacgagguggucuucaacuauccuacccgggccaacguacccgugcugcagggccucucccuggaggugaagaaaggccagacccuggcgcucgugggcagcuccggcuguggcaaaagcaccgucguccagcugcuggagcgguucuacgacccccuggccggcaccguguucguggacuuuggcuuucaacugcuggacggccaggaggcuaagaagcugaacgugcaguggcugagggcgcagcucggcaucgugagccaggagcccauccuguuugauugcagcauugccgaaaacaucgcguacggcgacaacagccguguggugucccaggacgagauugugagcgccgccaaagccgccaacauccaccccuucaucgagacccugccccacaaguacgagaccagggugggcgacaagggcacgcagcugagcgggggacagaagcagcgcaucgccaucgcccgggcgcugaucaggcagccccagauccuacugcuggacgaggcgacgagcgcccuggacaccgagagcgaaaaaguggugcaagaggcccucgacaaggcccgggaaggccgcaccugcaucgugauagcccacaggcugagcacgauucagaacgccgaccugaucgugguguuccaaaacggucgcgugaaggagcauggcacccaccagcagcugcuggcccaaaagggcaucuacuucuccauggucagcgugcaggccggcacccagaaccug

SEQ ID NO: 77 - RNA, 3858 nt, Artificial Sequence
  Synthetic Polynucleotide
auggaccuggaggccgccaagaacgguaccgcguggaggcccaccagcgccgaaggcgacuucgaacucggcaucagcucuaagcagaagcggaagaagaccaagaccgugaagaugaucggugugcugacccuguucagguacagcgacuggcaggauaagcuguuuaugagccucggcaccaucauggccaucgcccacggcagcggccuuccccugaugaugaucguguuuggagagaugaccgacaaauucguggacaccgccggcaacuuuagcuuccccgugaacuucucccucucccugcugaaccccggcaagauccuggaggaggagaugacccgcuacgccuacuacuacagcggccugggagccggggugcugguggccgccuacauccaaguguccuucuggacccuggccgccggccgacagauccgcaagauccgccagaaguucuuccacgccauccucaggcaggagaucggaugguucgacaucaacgacaccacggagcugaacacccgccugacggacgacaucagcaagaucagcgagggcaucggugacaagguggggauguucuuccaagccgucgccacguucuucgccggcuucaucgugggcuuuauccggggguggaaacugacccucgugaucauggccaucagccccauccugggccucuccgccgccgugugggccaaaauccucagcgccuucagcgacaaagagcucgcggccuacgccaaggccggcgccguggccgaggaggcccugggcgccauacggaccgugaucgcguucggcggccagaacaaggagcuggagcguuaccaaaagcaccuggaaaacgccaaggagaucgggaucaaaaaggccauauccgccaacaucuccaugggcauugcguuccugcugaucuacgccagcuaugcccuggcguucugguacggcuccacccuggugaucucaaaagaguacaccaucggcaacgccaugaccguguuuuucagcauccugaucggcgccuucucggugggccaggccgccccguguaucgacgccuucgccaacgcccgcggcgccgccuaugugaucuucgacaucauagacaacaaccccaagauagacuccuucagcgagcgggggcacaagcccgacuccauaaagggcaaucuggaguucaacgacguccauuucagcuaccccuccagggccaacgugaagauccugaagggcuuaaaccucaaggugcaaagcgggcagaccgucgcccuggugggcaguagcgguugcggcaagagcaccaccgugcagcucauccagagacuguacgacccggacgagggaaccaucaacaucgacggacaggauaucaggaauuucaacgugaauuaccugcgugagaucaucgggguggugagccaggaacccgugcuguucagcaccaccaucgccgagaacaucugcuacgggcgcggcaacgucacgauggacgagaucaaaaaagccgugaaagaggccaaugccuacgaguuuaucaugaagcugccccagaaguuugacacccuggugggcgagcgaggcgcccagcucuccggcggccagaagcagcggaucgccaucgcccgggcccuugugcguaaccccaagauccuccugcuggacgaagccaccagcgcccuggacaccgagagcgaggccgaaguacaggccgcccuggauaaggccagggaggguaggaccaccaucgugaucgcgcacaggcugagcaccgugaggaacgccgaugugaucgcgggcuucgaggacggcgugaucguggagcaggggagccacagcgagcugaugaaaaaggagggcgucuacuucaaacuggugaacaugcagacgagcggcagccagauccagagcgaggaguucgagcugaacgacgagaaggccgccacacggauggcccccaacggcuggaagucccggcuguuuaggcacuccacccaaaaaaaccugaagaacagccagaugugccagaagagccucgacguggagaccgauggacuggaggccaacgugccccccguguccuuccugaaggugcugaagcugaacaagacagaguggcccuacuucguggugggaaccguuugcgccaucgccaacggcggccugcaaccggccuuuuccgugaucuuuagcgagaucaucgcgaucuucgggcccggagacgacgccgucaaacagcagaaguguaacaucuuuucgcuuaucuuucuguuccugggcaucaucaguuucuucaccuucuuccugcaaggguucaccuucggcaaggccggggaaauccucaccaggaggcugaggagcauggcguuuaaggccaugcugcgccaagacaugagcugguucgaugaccacaagaacuccaccggggcccuguccaccaggcuggccacggacgccgcccaggugcagggcgcgacgggcacccggcucgcgcugaucgcgcagaacaucgcaaaccugggcaccggcaucaucaucagcuucaucuacggcuggcagcugacccuccugcugcuggccguagucccgaucaucgccgucagcggcaucgucgaaaugaagcuccuggccggcaacgccaagagagacaagaaggaacuggaggccgcggggaagaucgccacggaagccaucgagaacauacgcacagucgucagccugacccaagagaggaaauucgagucaauguacguggagaagcuguacggcccguaccggaacagcgugcagaaggcccacaucuacggaaucaccuuuagcaucucccaggccuucauguacuucagcuacgccggaugcuuccgauucggcgccuaccucaucgugaauggccacaugagguuccgcgacgugauccucguguucagcgccaucguguucggcgccguggcgcuaggccacgccagcagcuucgcccccgacuacgccaaggccaaacugagcgcagcccaccuguucaugcuguucgagaggcagccccucaucgacucauauagcgaggagggccugaagcccgacaaguuugagggcaacauaaccuuuaacgaggucguguucaacuauccgacuagggccaacgugcccgugcugcaggggcugucccuggaggucaagaaggggcagacccucgcccuggugggcagcagcggcugcggaaagagcaccgugguccagcugcucgagagguuuuacgauccgcuggccgggaccguguucguggacuucggcuuucagcuccuggacggccaagaggccaaaaagcucaacgugcaauggcugagggcgcagcugggcaucgugagccaggagcccauacuauuugacugcagcaucgcggagaacaucgccuacggcgauaacagccgggucgugagccaggacgagaucgugagcgccgccaaagccgccaacauccacccguucaucgagacgcugccccacaaguacgagaccaggguaggcgacaagggcacccagcuguccgggggccagaagcaaaggaucgccaucgcgagagcccugauccgccagccgcagauccugcugcuggaugaggccaccagcgcccuggacaccgagagcgagaaggucgugcaggaggcccuggacaaggcccgggagggcaggaccugcaucgugaucgcccacaggcugucgacgauccagaacgccgaccugaucgucgucuuccagaacggcagggucaaggagcacggcacccaccagcagcuccuggcccaaaagggcaucuauuucuccauggugagcguccaggccggcacccagaaccug

SEQ ID NO: 78 - RNA, 3858 nt, Artificial Sequence
  Synthetic Polynucleotide
auggaccuggaggcggccaaaaacggcaccgccuggaggcccaccagcgccgagggcgacuucgagcucggcaucuccuccaagcagaaacggaagaagacaaagaccgucaagaugauuggcgugcucacccuguucagguacagcgacuggcaagacaagcuguucaugagccugggcaccaucauggccauagcccacggcagcgggcugccccugaugaugaucguguucggcgagaugaccgacaaauucguggauacggccgggaacuucagcuuccccgugaacuucucgcugagccugcucaaccccggcaagauccuggaggaggagaugacccgguacgccuacuauuauagcggccucggagccggcguccuggucgccgccuauauccagguguccuucuggacgcuggccgccgggcggcaaaucaggaagaucaggcagaaguucuuucaugcgauccuccggcaggagaucggcugguucgacaucaacgacaccaccgagcucaacacaagacugacagaugacaucagcaagaucuccgaagggauuggggauaaggugggcauguucuuccaggccguggccaccuucuuugccggauuuaucgucggguuuauccgcggcuggaaacugacgcuggugaucauggccaucagccccauccugggucugagcgccgccguaugggccaaaauccucagcgccuuuagcgacaaagaacucgcggccuacgccaaggccggcgccguggccgaagaggcccucggcgcgaucaggacagugaucgccuuuggcggccagaacaaggaacuggagcguuaccaaaagcaccuggagaacgccaaggagaucggcaucaagaaggccauaagcgcaaacaucuccaugggcaucgccuuucuccugaucuacgcguccuaugcccucgccuucugguacggaagcacccuggugaucagcaaggaguacaccaucggcaacgccaugaccguguucuucagcauccugaucggcgccuucagcgugggccaagcggcccccuguaucgacgccuucgccaacgcccgaggcgccgccuacgucaucuuugacaucauugacaacaaccccaagaucgacagcuucucggagcgcgggcacaagcccgacagcaucaagggcaaccuggaguucaacgauguacauuucagcuaccccuccagggccaacgugaagauccugaagggccugaaccucaagguccaguccggccagacgguggcccuggugggcuccagcggcugcgggaagagcacgaccgugcagcugauccagaggcuguacgaccccgacgagggcaccaucaauaucgacggucaagacauccguaacuucaacgugaacuaccugcgcgagaucaucggcguggucagccaggagcccgugcuguuuuccaccaccaucgcggagaauaucugcuacgggagggggaacgucacgauggacgagaucaagaaggccgugaaggaggccaacgccuacgaguuuaucaugaagcugccccagaaguuugauacccucgugggggaacgcggggcccagcugagcggcggccagaagcagaggaucgccauugcccgcgcccuugugagaaaccccaaaauccugcugcuggacgaagccaccagcgcccuggacaccgaguccgaagccgaggugcaggccgcacuggacaaagcccgcgagggccggacgaccaucgugaucgcgcacaggcuguccaccgucaggaaugcggacgugaucgccggguucgaagacggggugaucguggaacaggggucccacuccgagcugaugaagaaggagggcguguauuucaagcuggugaacaugcaaaccagcggcagccagauccagagcgaagaguucgagcucaacgacgagaaggccgccacccgcauggcgccgaacggauggaaaagcaggcuguuucgacacagcacccagaagaaccugaaaaauagccagaugugccagaagucccuggacguggaaaccgacggccuggaggccaacgugccccccgugaguuuccugaagguccugaaacugaacaagaccgaguggccguacuucguggugggcacagugugugcgaucgccaacgggggccuccagcccgcauucuccgugauauucagcgagaucaucgccaucuuuggccccggcgacgacgccgugaagcagcagaagugcaacaucuucagccugaucuuccuguuccucggcaucaucagcuucuuuaccuucuuccugcagggguucaccuucggcaaagcaggcgagauacugaccaggcggcugcggagcauggccuucaaggccaugcugaggcaggacaugagcugguuugacgaccacaaaaacagcaccggggcuuuaagcaccaggcuggccaccgacgccgcccaggugcaaggcgccacgggcaccaggcucgcccugaucgcccaaaacauugcaaaccuggggaccggcaucaucauuagcuuuaucuacggcuggcagcugacccuccuacugcuggccgugguccccaucaucgccgugagcggcauaguggagaugaagcuccucgccggcaacgccaagcgggacaaaaaggagcuggaagccgccgggaagaucgccaccgaggccaucgagaacauccggaccguggugucccuaacccaggagcggaaguuugagagcauguacguggagaagcucuacgggcccuacaggaacuccgugcagaaagcccacaucuacggcaucacguucuccauuagccaggcuuucauguacuucuccuacgccgguugcuuuagauucggcgccuaccugaucgugaacggccacaugagguucagggacgucauccugguguucagcgccaucguguucggggccgucgcccucggccacgccagcagcuucgcccccgacuacgccaaagcuaaacuguccgccgcccaccuguucaugcucuucgagaggcagccccugaucgacagcuacagcgaagagggccugaagcccgacaaguucgagggcaacauaaccuucaacgagguugucuucaacuacccgacccgugcgaacgugcccgugcugcaaggucugagccuggaggugaagaagggccagacccuugcgcugguggggagcagcggcugcggcaaguccacuguggugcagcugcuggaacgauucuacgacccccuggccggcaccguguucguggacuucggcuuccaacugcucgacggucaagaggccaagaaacugaacgugcaguggcucagggcccagcucggcaucgugagccaggagcccauccuguuugacugcagcaucgccgagaauaucgccuacggggacaacagcaggguggugagccaggaugagaucgugagcgccgccaaggccgccaacauucaccccuucaucgaaacccugccccacaaguacgagacccgggugggugauaagggcacgcagcugagcgggggccagaagcagaggauugcgaucgccagggcccugauccggcagccccaaauccugcugcuggacgaggccaccucagcccuggacacagagagcgagaagguggugcaggaggcccuggacaaggcgagggagggacggaccugcaucgugaucgcacacaggcugucaacgauucagaacgccgaccucaucguggucuuccagaacgguagggucaaggagcacggcacccaccagcaacuccuggcccagaagggcaucuacuucagcauggugagcgugcaggccggcacccagaaccug

SEQ ID NO: 79 - RNA, 3858 nt, Artificial Sequence
  Synthetic Polynucleotide
auggaucuggaggccgccaaaaacgggacugccuggaggcccaccagcgccgagggcgacuucgagcuggggauaagcagcaagcaaaagaggaagaagaccaagaccgugaagaugaucggggugcugacccuguuccgguacagcgauuggcaggacaagcucuuuaugagccuggguaccaucauggccaucgcccacgggagcgggcugccccugaugaugaucguguucggcgagaugaccgacaaauucguggauacggcgggcaacuucagcuuccccguaaauuuuagccucucacugcugaacccagggaaaauccuggaggaggagaugacgagguaugccuauuacuacagcggacugggggccggcguccugguggccgccuacauccaggugagcuuuuggacccuggccgccggccgacagauacguaagaucaggcagaaguucuuccacgccauccugaggcaggagaucggcugguuugauaucaacgacacgaccgaacugaacaccaggcugaccgacgacaucucgaaaaucucggagggcaucggcgauaagguuggcauguucuuccaggcggucgccaccuucuucgcaggcuucaucgugggguucaucaggggcuggaagcugacccuggugaucauggccaucagccccauccucggacugagcgccgccgugugggcgaagauccuguccgccuucagcgacaaggagcuggccgccuacgccaaggcgggcgccguggcggaggaagcgcugggugccaucaggaccgucauagccuuugguggccagaacaaggagcuugagcgcuaucagaagcaucuggaaaacgccaaggagaucgggaucaagaaagccauuagcgccaacaucaguaugggcaucgccuuccugcucauuuacgccagcuacgcccuggccuucugguacgguuccacccuggugaucuccaaggaguacaccaucggcaacgccaugaccguguuuuucagcauccugaucggcgccuucuccgugggccaggccgcccccugcaucgaugccuucgccaacgcccggggcgccgccuacgugaucuucgacaucaucgacaacaauccgaagaucgacucguuuagcgagaggggccauaagccggauuccaucaagggaaaccuggaguuuaacgaugugcacuucagcuaccccagccgggccaacgugaagauccugaagggccugaaccugaaggugcagagcggccaaaccguggcgcuggucgggagcagcggguguggcaagaguaccacggugcagcugauccaaaggcuguacgaccccgacgaggggaccaucaacaucgauggccaggacaucaggaacuucaaugucaacuaccugagggagauaaucggcguggugagccaggagcccgugcuguucagcaccaccaucgccgagaacauauguuacgggcggggcaacguaaccauggacgagaucaagaaagccgugaaggaggccaacgccuacgaguuuauuaugaagcugccacagaaguucgacacccuggugggcgaaaggggggcccagcugagugggggccagaaacagcgcaucgccaucgcccgugcccucgugaggaaccccaagauccugcugcuggacgaggccacgucggcccuggacacggaauccgaggccgaggugcaggcggcccuggacaaggcgcgggagggccggaccacaaucgugaucgcucacaggcuguccaccguacggaacgccgacgucaucgccggauucgaggacggggugauaguggagcaggggucccacagugagcucaugaagaaggagggcguguacuucaagcuggucaacaugcagaccuccggcucgcaaauccaguccgaggaauucgaacugaacgacgagaaggccgccaccaggauggcccccaacggguggaaaucccgccuguucaggcacagcacccagaagaaucugaagaacagccagaugugccagaaaagccucgacguggagaccgacggccuggaggccaacgugccgccggugagcuuccugaaggugcugaagcugaacaagaccgaguggccguacuucguggugggcaccgugugcgccaucgccaacggcgggcuccaacccgccuucagcgugaucuucagcgagaucaucgccaucuucggcccgggcgaugacgccgugaagcaacagaagugcaauauauucagccugaucuuccuguuccugggcaucaucagcuuuuucaccuucuuucugcagggguucaccuucggcaaggccggcgagauccucacgaggcgucugcgguccauggccuucaaagccaugcucaggcaggacaugagcugguucgacgaccacaaaaacagcaccggcgcccugucgacacggcucgccaccgacgccgcgcagguccagggcgccaccgggacccggcuggcccugaucgcccagaacaucgcgaaccugggcaccggcauaaucaucuccuucaucuacggcuggcagcugaccuugcugcuccuggccguugugcccauaaucgccgucagcggcaucguggagaugaagcugcuggcgggcaaugcgaaaagggacaagaaggagcucgaggccgccgggaagaucgcgaccgaggccaucgagaacauccggaccguggugucccugacgcaggagcggaaguucgaaucgauguacguggaaaagcuguacggucccuacaggaacagugugcagaaagcccacaucuacggcauaaccuucagcaucagccaagcguuuauguacuucagcuacgccgggugcuucagguucggcgccuaccugaucgugaacggccacaugcgauucagggaugugauccugguguucuccgccaucguguucggcgcugucgcccugggccaugccagcuccuucgcgccugauuaugccaaggccaagcuguccgccgcccaccuguucaugcuguucgagcgccagccccugaucgacagcuacuccgaagaaggccugaagcccgacaaguuugaagggaacaucacauucaaugagguggucuuuaacuaccccacccgggccaacguccccguucugcagggccugagccuggaggugaaaaagggccagacccuggcccuggugggcuccagcggcuguggcaagagcacggucgugcagcugcuggagcgguuuuacgauccccuggccggcacgguguucgucgauuucggcuuccagcuccuggacggccaggaggccaagaagcugaacgugcaauggcugcgggcccagcucggcaucguaucccaggagcccauccuguucgacugcagcaucgccgagaacaucgccuacggcgauaacucccgaguggugucccaggaugagaucguuuccgccgccaaggcggccaacauccaccccuucauagagacccugccgcacaaguacgagaccagggucggagauaagggcacccagcugagcggcggacaaaaacaacgaaucgccaucgcccgggcccucauccggcagccccagauccugcugcuggaugaggccacgagcgcccuggacacggaguccgaaaaggugguacaggaggcccucgacaaggccagggagggccggaccugcaucgugaucgcccaccgccuguccaccauccaaaacgccgaccugaucgucguguuccagaacggcagggugaaggagcacggcacccaccagcagcugcuggcccagaagggaauauauuuuucaauggucagcguccaggccggcacgcagaaucug

SEQ ID NO: 80 - RNA, 3858 nt, Artificial Sequence
  Synthetic Polynucleotide
auggaccuggaggccgcgaagaacggaaccgccuggaggcccaccagcgccgaaggagauuucgagcugggcaucuccuccaagcagaaacgcaagaagaccaaaaccgugaagaugaucggagugcucacccucuucagguacagcgacuggcaggacaagcucuucaugucccugggcacaaucauggccaucgcccacggcagcggccugccccugaugaugauuguguucggcgaaaugaccgacaaguucgucgacaccgccggcaacuucuccuuccccgugaacuuuagucugagccuucugaaccccgggaagauccucgaggaggagaugacacgguacgccuacuacuacagcggacugggagccggagugcugguggccgcuuacauccaggugagcuucuggacccuggccgccggacgccagaucaggaagaucaggcagaaguucuuccacgccauacugaggcaggagaucggcugguucgacaucaacgacacuacagagcugaacaccaggcugaccgacgacaucagcaagaucagcgagggcaucggagacaaggugggcauguucuuccaggccguggccaccuucuucgccggcuucaucgugggcuuuaucaggggguggaagcugacccucgugaucauggccaucucccccauccucgggcugagcgcggccgugugggcuaagauccuguccgccuucuccgauaaagagcuggccgccuacgcgaaggccggcgccguggccgaggaggcccugggcgccaucaggaccguuaucgccuucggaggccaaaacaaggaacuggaacgguaccagaagcaccucgagaacgccaaggagaucgggaucaagaaggccaucuccgccaacauuaguaugggcaucgccuuucugcugaucuacgccuccuaugcccuggccuucugguacggcagcacccuggucaucuccaaggaguacaccaucgggaacgccaugacaguguucuucuccauccugaucggcgccuuuuccguggggcaggcagcccccugcauugacgccuucgcgaacgcgcgcggcgccgccuacgucaucuucgacaucaucgacaacaaccccaagaucgacagcuucagcgagaggggccacaagccagacagcaucaagggcaaccuggaguucaaugacguccacuuuagcuaucccagccgggccaacgugaagauacugaaggggcugaaccugaaggugcaguccggacagaccguggcccuggugggcagcagcggcugcggcaagagcaccaccgugcagcugauccagaggcuguacgaccccgacgagggcaccaucaacaucgauggccaagacaucagaaacuucaacgucaacuaccucagagagaucaucggcguggugucccaggagcccgugcuguucagcaccaccaucgccgagaacaucugcuacggccggggcaaugugaccauggacgagaucaagaaagccgugaaggaggccaacgcguacgaguucaucaugaagcugccccagaaguucgacacccuggugggcgagcgaggcgcccagcugagcggcggccagaagcagcggaucgccaucgcgcgggcucuggugcggaacccgaagauccuccuccuggacgaagccacaagcgcccucgacaccgaguccgaggccgagguccaagccgcgcuggacaaggccagggagggcaggacaaccaucgugaucgcccaccggcuguccaccgugaggaacgccgaugugaucgccggcuucgaggacggcgugaucguggaacagggcagccacagcgagcugaugaagaaagaggggguguacuucaagcuggugaacaugcagaccagcgguagccagauucagagcgaagaguucgaacugaacgacgagaaggccgccaccaggauggcccccaacggcuggaagagccgccuguucaggcacagcacucaaaagaaccugaagaacagccagaugugccaaaagagccucgacgucgagaccgacgggcuggaggccaacgugccccccgugagcuuccugaaggugcugaagcugaacaagaccgaguggccguacuucgugguggggaccgugugcgcaaucgccaacggcggccugcagcccgccuuuagcgugaucuucagcgagaucaucgccaucuucggcccgggggacgaugccguaaagcagcaaaagugcaacauauucagccugaucuuccuguuccucgguaucaucagcuucuucaccuucuuucugcagggcuucaccuuugggaaggccggcgagauacugacccggaggcugaggagcauggccuucaaggccaugcugcggcaggacauguccugguucgaugaccacaagaauuccaccggggcccuguccaccaggcuggccaccgacgccgcgcaggugcaaggcgccaccgggacccgccucgcucugaucgcccagaacaucgcgaaccugggcaccgguaucaucaucuccuucauuuacggcuggcagcugacccugcuccugcuggccgugguccccaucaucgcgguuagcgggaucguggagaugaagcugcuggccgguaacgccaagcgggacaagaaagagcuggaggccgccggcaaaaucgccaccgaggccaucgagaacauaaggaccguggucagccuaacccaggagaggaaguucgagagcauguacguggagaagcucuacggccccuacaggaauuccgugcagaaggcccacaucuaugggaucacguucuccauuagccaagccuucauguacuucuccuacgccgggugcuucagguucggagcguaucugaucgugaacggccacaugcgguuccgggacgugauccugguguucagcgccaucguguucggcgccguggcccugggccaugccagcagcuucgcccccgacuacgcgaaggcgaagcuguccgccgcgcaccuguuuaugcucuucgagcggcagccccugaucgauagcuacagcgaggaaggccugaagcccgacaaguucgagggaaacaucaccuucaacgaagugguguucaauuaccccaccagggccaacgugcccgugcugcagggccugucccuggaggucaagaagggccagacccuggcacugguggguagcagcggcugcggcaagagcaccgugguccagcugcuagagcgcuucuacgacccccuggcgggcaccguguucguggacuucggguuccagcugcuggauggccaggaggccaaaaagcugaacgugcaguggcucagggcucagcugggcaucguuagccaggagccuauccuguucgacugcagcaucgccgaaaacaucgccuauggcgauaauuccagggucguaagccaggacgaaaucgugagcgccgccaaggccgcgaauauucaccccuuuaucgaaacgcugccccacaaguacgaaacacgggugggcgacaagggcacccaacuguccggcggccagaagcaacguaucgccaucgcccgugcgcugaucaggcagccccagauccuccugcuggacgaggccacgagcgcccuggacaccgaguccgaaaaggucgugcaggaggcgcuggacaaggcccgcgagggccgaaccugcaucgugauagcccauaggcugagcaccauccagaaugcugaccucaucgugguguuucagaacggccgcgugaaggaacacggaacccaccagcagcugcuggcccaaaaaggcaucuacuucagcauggugagcguccaggcgggcacccagaaccug

SEQ ID NO: 81 - RNA, 3858 nt, Artificial Sequence
  Synthetic Polynucleotide
auggaccuggaggccgccaaaaacggcacagccuggcggcccacaagcgccgagggagacuucgagcugggcaucaguagcaagcaaaagcgcaagaagaccaagaccgugaagaugaucggcgugcugacccuguuccgguacagcgacuggcaggauaagcuguucaugagccugggaacuaucauggccaucgcccacggcagcgggcugccccugaugaugauagucuucggcgagaugacggacaaauucguggacaccgccggcaacuucagcuuccccgugaacuucagccugagccuccucaaucccggcaagauccuggaggaggagaugaccagauaugccuacuauuacagcggccugggcgccggcgugcuggucgcggccuacauccaagugagcuucuggacccuggccgccggccggcagaucaggaaaaucaggcagaaguuuuuucacgccauccugcggcaggagaucggcugguucgauaucaaugacaccaccgaacugaacacccggcugaccgaugauaucuccaagaucagcgaagggaucggcgauaaggucggcauguucuuccaggccgucgccacguucuucgccggcuucaucguggguuuuaucaggggcuggaagcugacccuggucauaauggcaaucagccccauccugggccucagcgcggccguuugggcgaagauccugagcgccuucucagacaaggagcuggccgcguacgccaaggcaggcgccguggccgaggaggcccugggggccaucaggaccgucaucgccuucggcggccagaacaaggagcuggagagguaccagaagcaccucgagaacgccaaagaaaucggaaucaaaaaggccaucagcgccaacaucagcauggggaucgccuuccuccucaucuaugccuccuaugcgcucgccuuuugguacgguagcacccuggucaucagcaaggaguauaccauaggaaacgccaugaccguauucuuuagcauacucaucggcgccuucuccgugggccaggccgccccgugcaucgacgccuucgcaaacgcccggggcgccgccuacgugaucuucgauaucauagacaacaaccccaaaaucgauagcuuuagcgaacgaggccacaagcccgauagcaucaaagguaaucucgaauucaaugauguccacuucuccuaucccucacgagccaacgugaaaauccuuaagggccucaaccugaaagugcaguccggccagacuguggcccuggugggcuccagcgggugcgguaaguccaccaccgugcaacugauccaaaggcucuacgaccccgacgaggggaccaucaauaucgacggccaggacauccgcaacuucaacgugaacuaucucagggagaucaucgggguggugucacaggagcccgugcucuucagcaccaccaucgccgagaacaucugcuacgggcgcggcaacgugaccauggaugagaucaagaaggccguuaaggaagcgaaugccuacgaguuuaucaugaagcugccccagaaauucgacacccuggugggugagaggggcgcacagcuguccggcggccaaaaacaacgcauagccauugcccgugcccuggugaggaauccgaagauccugcugcuggacgaggccaccagcgcccuggauacggaaagcgaggccgaagugcaggccgcccuggauaaggccagggaggggaggaccacuauagugauagcgcauaggcugagcaccgugcggaacgccgacgugaucgccggcuucgaggauggcgugaucguggaacaggggagccacuccgaacugaugaagaaggaaggcguguacuuuaagcuggucaauaugcagaccucugggagccagauccagagcgaggaguuugagcucaacgaugagaaggccgccaccaggauggcccccaacggcuggaaaagccgacuguuccggcacagcacccagaagaaccugaagaacagccagaugugccagaagagccuggacguggagaccgacggccuggaggccaacgucccgcccguguccuuccugaaggugcucaaacugaacaagacggaguggcccuauuucguggucggcaccgugugcgccaucgccaacgggggccugcagcccgccuucagcgugaucuucucggagaucauagccaucuucgggcccggagacgacgccgugaagcagcagaaauguaacaucuucucccugaucuuccuguuccugggcaucauaagcuucuucaccuucuucuugcagggcuucaccuuuggaaaggccggcgagauacugacccgucgccugaggagcauggccuuuaaggccaugcugcggcaggauaugucgugguuugacgaucacaagaacagcaccggcgcccugucgacgaggcuggcaaccgacgccgcccaggugcagggcgccacggggacccggcuggcacugaucgcccagaacaucgccaaccugggcaccgguaucaucaucagcuucaucuacggguggcaacugacgcugcugcugcuggccgugguccccauaaucgccgugucaggcaucgucgagaugaagcugcuggcaggcaaugccaaacgcgacaagaaggagcuggaggccgccggcaagauagccaccgaggccaucgagaacauccggaccguggugagccugacccaagagcggaaguuugagagcauguacguggagaagcuguauggcccauaccgaaacagcgugcagaaggcccauaucuacggcauaaccuucagcaucucccaggccuucauguacuucagcuacgccgguugcuuccgguuuggggccuaccucaucgugaacggccacaugagguucagggacgugauccugguguucagcgccaucguguuuggcgccguggcccuggggcacgccagcucguucgcccccgauuacgccaaggccaagcucagcgccgcccaccuguucaugcuguuugagaggcagccccugaucgacuccuacucugaggagggccucaagcccgacaaguuugagggaaacaucaccuucaacgaagugguuuucaauuaccccacgagggccaacgugcccgugcugcagggacugagccuggaggugaaaaaggggcaaacccuggcgcuggugggcagcucuggcugcggcaaguccaccguggugcagcuccuggagagguucuacgauccucuggccgggaccguguucguggacuuuggauuccagcugcuggacgggcaggaagccaagaaacugaacguccaguggcugagggcgcaacugggcaucgugagccaggagcccauccuguucgauugcagcauugccgagaacaucgccuacggcgacaauuccaggguggugagccaggaugagaucgugagcgccgccaaggccgccaauauccaccccuucaucgagacccugccccacaaguaugaaaccagggucggcgacaagggcacccagcucagcggaggccagaaacagaggauagccaucgccagggcccugaucaggcagccccagauccuccugcuggacgaggccaccagcgcccuggauaccgagagcgaaaagguggugcaagaggcccuggacaaggccagggagggccggaccugcauaguaaucgcccauaggcugucgacgauccagaacgccgaccucaucguggucuuccaaaacggccgggugaaggaacacgggacccaccagcagcugcuggcccagaagggcaucuacuucucgauggugagcgugcaggccggcacgcagaaccug

SEQ ID NO: 82 - RNA, 3858 nt, Artificial Sequence
  Synthetic Polynucleotide
auggaccuggaggccgccaagaacgggaccgccuggaggccgaccucagcggagggcgauuucgagcuggggaucagcucaaagcagaagcggaaaaaaaccaaaaccgugaagaugaucggugugcugacccuguuucgguacagcgacuggcaggacaagcuuuuuaugagccugggcaccaucauggccaucgcccauggcagcggccugccccugaugaugaucguguucggcgagaugaccgacaaguucguggacacggccggaaacuucagcuuucccgugaacuucagccugucccuucugaaccccggcaagauccuggaagaggagaugacccgguaugccuacuacuacagcggccugggggccggcgugcucguggccgccuacauccaggugagcuuuuggacccuggccgccggccggcagauucgcaagaucaggcaaaaauucuuccacgccauccugcggcaggagaucggcugguuugacaucaacgacaccacugaacugaacacgcgucugaccgacgauaucagcaagaucagcgagggcaucggcgauaaggugggcauguucuuccaagccguggccacguucuucgccggguucaucgugggcuuuauccggggguggaagcugacccucgugaucauggcgaucagccccauucugggccugagcgccgccgugugggccaagauccuuagcgcguucuccgacaaggagcucgccgccuaugccaaggccggcgccguggccgaggaggcccugggcgccauccggaccgugaucgcguuugguggccagaacaaggagcuggagcgcuaccagaagcaccuggagaacgccaaggagaucggcaucaagaaggcgaucagcgcaaauauaagcaugggaauugccuuccugcugaucuacgccagcuacgcgcuggccuuuugguauggcuccacccucgugauaagcaaggaguacaccaucggcaaugccaugaccguguucuuuagcauccugaucggggccuuuagcgugggccaggccgcgcccuguaucgacgccuuugccaacgcaaggggagccgcguacgugaucuucgacaucaucgacaacaaucccaagaucgacagcuucagcgaacggggccacaagcccgacuccaucaagggcaaccuggaguucaacgacgugcacuucuccuaccccucccgggcgaacguuaagauccugaaggggcugaaucugaaggugcagagcggccagaccguggcccuggugggcagcagcggcugcggcaagucaaccaccgugcagcugauacagcggcuguacgaccccgacgagggaaccaucaacauugacggacaggacaucaggaacuuuaacgugaacuaccuaagggagaucaucggggucgucucccaggagcccgugcuguucuccaccaccaucgccgaaaauauuuguuaugggcggggcaacgugacgauggaugaaaucaagaaggccgugaaggaagccaacgcauaugaguucaucaugaagcugccccagaaguuugacacccuggugggagaaaggggcgcccagcuguccggcggccagaagcagaggaucgccaucgcccgcgcucuggugcggaaccccaagauccugcuccuggacgaggccaccagcgcccuggacaccgaguccgaggcggaggugcaggccgcccuggacaaggccagggaggggaggacgaccaucgugauugcccacaggcuguccaccgugcggaacgccgaugugaucgccggcuucgaggacggcgugaucgucgagcaggggagccacuccgagcugaugaagaaggagggcguguacuucaagcuggugaacaugcaaaccuccggcagccagauccaaagcgaggaauucgagcucaacgacgagaaagccgcgaccaggauggcccccaacggcuggaagagccgccucuuccggcacucaacccagaagaaccugaaaaacagccagaugugccagaagagccuggauguggagaccgacggccucgaagccaacgugccccccgucagcuuucugaaggugcugaaacugaacaaaaccgaauggccguacuucguggugggcaccgugugugccaucgccaacggcggccugcaacccgccuuuagcgugaucuucagcgagaucauagccaucuucggacccggggacgacgccgugaagcagcaaaagugcaacauauucucccugaucuuucuguuccuuggaaucaucagcuucuuuacguuuuuccugcagggcuuuaccuucggcaaggccggcgaaauccugacacggagacugcgcagcauggccuuuaaggccaugcugcggcaggacauguccugguucgacgaccauaaaaacagcaccggcgcccugagcaccaggcuggccaccgaugccgcccagguccagggagccaccggcacccgacucgcccuaaucgcccagaacaucgcuaaucugggcacggggaucaucaucagcuucauauacggcuggcagcugacccugcugcugcucgccguggugcccaucaucgccgugagcgggaucguggagaugaagcugcuggcggggaacgccaagagggacaagaaggagcuggaggccgcuggcaagaucgccaccgaagccaucgagaacauccgcaccguggugucccugacccaggagaggaaguucgaguccauguacguggagaagcuguauggccccuacaggaacagcgugcagaaagcccacaucuacgguaucaccuuuuccaucagccaggccuuuauguauuucagcuacgccggcugcuuccgcuucggcgccuaccugauugugaacggccacaugcgcuucagggacgugauccugguauucagcgccaucgucuucggcgccguggcccucgggcacgcauccuccuucgcgcccgacuacgcgaaggccaagcuuagcgccgcccaccucuuuaugcuguucgagaggcagccccuuaucgacucauacuccgaggagggucugaaacccgauaaauucgaggggaacauaaccuucaacgaggugguguucaauuaccccacccgggcgaaugugcccguccugcagggccugucccuagagguaaagaaaggccagacccucgcccucgugggcagcagcggcugcggcaagucgaccgucgugcaacugcuggagagguucuacgacccccuggccgggaccguuuucgucgacuucggguuccagcugcuggacgggcaggaggccaagaagcucaacgugcaguggcugcgggcccagcugggaaucgugagccaggagcccauccucuuugacugcuccauagccgagaauaucgccuacggggacaacagccgcguggucagccaagaugaaaucgugagcgcggccaaagccgccaacauccaccccuucauagaaacccugccccacaaguacgagaccagggugggcgauaagggcacccagcuguccggaggccagaagcagcggaucgccaucgcgcgggcccucaucaggcagccgcagauacugcugcuggacgaggccaccagcgcccuagauaccgagucugagaagguggugcaggaggcccucgacaaagcccgggaggggcguaccugcauagugaucgcccaccggcuguccacgauccaaaaugccgaccugaucgugguguuccagaacggacgcgugaaggagcacggcacccaccagcagcuccuggcccagaaaggcaucuacuucuccauggugagcgugcaggccgggacgcagaaccug

SEQ ID NO: 83 - RNA, 3858 nt, Artificial Sequence
  Synthetic Polynucleotide
auggaccuggaggccgcaaagaacgggacggcguggcggcccaccagcgccgagggcgacuucgagcugggcaucaguucgaaacagaagaggaagaagaccaagacagugaagaugaucggcgugcugacccucuucagguacuccgacuggcaagauaagcuguucaugucgcugggcaccaucauggcaaucgcccauggcagcgggcugccccugaugaugaucguguuuggcgagaugaccgacaaguucguggacaccgccggcaauuucagcuucccugucaacuucagccugucccugcugaacccggggaagauccuugaagaggagaugaccagguacgccuacuacuacagcggccuaggugccggcguguugguggccgccuacauccagguuucauucuggacccuggccgcgggcaggcagauccggaagauaaggcagaaauucuuccacgcgauccugaggcaggagaucggcugguucgacaucaaugacaccacggagcugaacacccggcugaccgacgacaucagcaagaucuccgagggcaucggcgacaaggugggcauguucuuccaggcaguggccacauucuucgccggcuucaucgugggcuucaucaggggguggaagcugacccuggugaucauggccauaucccccauacucgggcucucagccgcugugugggccaagauccuauccgccuucuccgauaaggaacucgccgccuacgccaaggccggagccgucgcggaggaggcccugggggccauacgaaccgugauagccuuuggaggccagaacaaggagcuggagagguaccagaagcaccuggagaacgccaaagagaucggcauuaagaaggccaucuccgccaacaucuccauggggaucgccuuccugcucaucuacgccagcuacgcccuggccuucugguacggcagcacccuggugaucuccaaggaauacaccaucggcaacgccaugaccguguuuuucagcauccugaucggcgccuucagcguuggccaggccgcacccugcaucgacgccuucgcaaacgcccgcggcgccgccuacgugaucuucgacaucaucgacaacaaccccaagaucgacagcuuuuccgagcgcggccacaagccggauagcaucaagggcaaucuggaguucaaugacgugcacuucagcuaccccaguagggccaacgugaaaauccugaaagggcugaaucugaagguacaguccggacagaccguggcccucgucggcagcuccgguugcgguaagagcaccaccgugcagcugauccaaaggcuauaugaucccgaugagggcaccauuaacaucgacggccaggacauccggaauuucaacgugaacuaccugcgggagaucaucggcgugguaagucaggaacccgugcucuucagcacaaccaucgccgagaauaucugcuacgguaggggcaacgugaccauggacgagaucaaaaaggccgucaaggaagccaacgccuacgaguuuauuaugaaacugccccagaaguuugacacccuggugggcgagcgcggcgcccagcugagcgggggccagaagcagcgcaucgccaucgcccgggcccuggugcgcaaccccaagauccugcugcuggaugaggccaccagcgcccuggacacugagagcgaagccgagguccaggcggcccuggauaaggcccgcgaaggccggaccaccaucgugaucgcccaccggcugucuaccguccgcaacgccgacguaaucgccggcuucgaggacggggugauuguggagcagggcagccacagcgagcugaugaaaaaggagggcgucuacuuuaagcuggugaauaugcaaacauccgguagccagauccagagcgaggaguucgaacugaacgacgagaaggccgccacccggauggcccccaacggcuggaagagcaggcuguuucgucacagcacucagaagaaccugaagaacagccagaugugccagaagagccuggacgucgagacagauggccuggaggcaaacgugcccccgguuagcuuccugaaggugcugaagcugaacaagacagaguggcccuacuucguggugggcacggucugcgccaucgccaaugguggccugcaacccgccuucagcgucaucuuuagcgaaaucaucgccaucuucgggcccggggaugacgccgugaagcagcaaaagugcaacaucuucagccugaucuuccucuuccugggcaucaucuccuuuuucaccuucuuccugcagggcuucaccuucggcaaggccggcgagauccugaccaggaggcugcgguccauggccuucaaggccaugcugcggcaagauaugagcugguuugacgaccacaagaauagcaccggcgcccugagcacacggcuggccaccgacgccgcccagguccagggggcuaccggcaccaggcuugcccuuaucgcccagaacaucgccaaucugggcaccggcaucaucaucucguucaucuauggcuggcagcugacgcuccugcugcuggccguggugcccaucaucgccguguccggcaucguggagaugaagcugcuggcagggaacgccaaaagggacaagaaggagcucgaagccgcgggcaaaaucgccaccgaggcgaucgagaauauacgaaccguggugucccucacacaggagaggaaguuugaaucgauguacguggaaaaacuguacgggcccuacaggaacagcgugcagaaggcccacaucuauggcaucacguucucaaucucacaagccuucauguacuuuuccuacgccgggugcuuccgcuucggggccuaucugaucguaaacggacauaugagguuuagggaugucauucugguguucagcgccaucguguucggcgccguggcccucggacacgccagcagcuucgcccccgacuacgccaaggccaagcugucggccgcucaucuguucaugcuguucgagaggcagccccugaucgacucauacucugaggagggccucaagcccgacaaguucgagggcaauaucaccuucaacgaggucguguucaacuacccuaccagggccaacgugcccgugcuccaggggcugagccuggaggucaagaaggggcagacccuggcccuggugggcagcuccggcugcggcaagagcacagugguccagcugcuggagcgcuucuacgauccccuggcugggaccguguucgucgacuucggcuuccaacugcuggauggccaggaggccaagaagcugaacgugcaauggcugagagcccagcugggaauagugucccaggagcccauccuguucgacugcagcaucgcggagaacaucgccuacggcgacaacagccgcgugguaagccaggacgagaucgugagcgccgccaaggcggccaacauacaccccuucaucgagacccugccccacaaauacgagaccagggugggcgauaagggcacccagcucagcggaggccagaagcagcggaucgccaucgcccgagcccugauccggcagccccagauacugcuccuggacgaagccaccagcgcccuggacaccgagagcgagaagguggugcaggaggcccuggacaaggccagagagggccgcaccuguauagugaucgcccacaggcucagcaccauccagaacgccgaccugaucgugguguuccagaacggccgggugaaagaacacggcacccaucagcagcugcuggcccaaaagggcaucuacuucuccaugguguccgugcaggcggggacccagaaccug

SEQ ID NO: 84 - RNA, 3858 nt, Artificial Sequence
  Synthetic Polynucleotide
auggaccuggaggccgcgaaaaacggaaccgccuggaggccgacguccgccgagggagacuucgaacugggcaucagcagcaagcagaagcguaagaagacgaagaccgugaagaugaucggggugcugacgcuguuucgcuacuccgacuggcaggacaagcuguucaugagccugggcacuaucauggccaucgcccacggcagcggacugccccugaugaugaucguguucggcgagaugacggauaaguucgucgacaccgccggcaacuuuagcuuccccgugaacuucagccucucgcugcugaacccggggaagauccucgaggaggagaugacccguuacgccuacuacuacagcggccucggcgccgggguccugguggcggccuacauacagguaagcuucuggacccucgcggccggccgucagauaagaaagaucaggcagaaguucuuccacgccauccugaggcaggagaucgguugguucgacaucaacgacaccacggagcugaacacgaggcugaccgacgauaucagcaagauuucggagggcaucggcgacaaggucgggauguucuuucaggccgucgccaccuucuucgccggcuucaucguaggcuuuauaaggggguggaagcugacccuggugaucauggccaucagcccgauccucggacucagcgccgccgucugggccaaaauccugagcgcuuuuuccgauaaggagcuggccgccuacgccaaggccggcgccguggccgaggaagcccugggcgccaucaggaccgucaucgcauucggcggccagaacaaggagcuggagcgguaccagaagcaccuggagaacgccaaagaaaucggcaucaagaaggccaucagcgccaacaucagcauggggauagccuuccuccugaucuaugcgagcuacgcccuggcuuucugguacggcagcacacuggugauauccaaggaguacaccaucgggaacgccaugaccguguucuucagcauccugaucggggccuucagcgugggacaggccgcccccugcaucgacgccuucgccaacgccaggggcgccgccuacgugaucuucgacaucaucgacaacaaccccaaaaucgacagcuuuagcgagagagggcacaagcccgacucuaucaaagggaaucuggaguuuaaugacgugcacuuuagcuacccaagcagggccaacgugaagauccugaagggccugaaccugaaggugcagagcgggcagacgguggcccuggucggcagcagcggcuguggcaagagcaccacggugcagcucauccagaggcuguacgaccccgacgagggcaccaucaacaucgacggccaggacaucaggaauuuuaacgugaacuaucugagggagaucaucggcguggugucacaggaaccugugcuguucuccacgaccaucgccgagaauaucugcuacggaaggggcaacgucaccauggacgagaucaagaaggccgucaaggaggccaacgccuaugaauucaucaugaagcugccccagaaauuugacacucuggugggcgagcggggcgcccagcugagcggcggccagaagcagaggaucgcgaucgcgcgugcccugguaaggaaccccaagauacugcuccuggaugaggccacgagcgcccuggauacggaaagcgaggccgaggugcaggccgcccuggauaaggccagggaaggcaggacaaccaucgugaucgcccacaggcugagcaccguaaggaacgccgacgugaucgccgguuucgaggacggcgugaucgucgaacagggcucccacagcgagcugaugaagaaagaagggguguacuucaagcuggugaacaugcagaccagcgguucccaaauccagagcgaggaguucgagcugaacgacgagaaggccgcuaccagaauggcccccaacggguggaagagucgccuguucaggcauuccacccagaagaaccugaagaacagccaaaugugccaaaagucccuggacguggagaccgacggccuggaggccaacguaccccccgugagcuuccucaaggugcucaagcugaacaagaccgaguggccguacuucguggugggcaccgugugcgccauugccaacggcggccugcagcccgccuucuccgugaucuucagcgagaucaucgccauauuuggccccggcgacgaugccgugaaacagcagaaguguaacaucuucagccugauuuuccuguuccugggcaucaucucuuucuucaccuucuuccugcaggguuucaccuucggaaaggccggcgagauccugacccggcgucugaggagcauggccuucaaagccaugcugagacaggacaugucaugguuugacgaccacaaaaacagcaccggcgcccugagcacccggcucgcgaccgacgccgcgcaggugcagggcgccaccggcacccgacuggcccugaucgcccagaacauagccaaccugggcacagggaucaucauaagcuucaucuacggauggcagcugacccugcugcugcuggcggucgugcccauaaucgccgugagcgggaucgucgagaugaagcugcucgccggcaacgcgaagcgcgacaagaaggagcucgaggccgcgggcaagaucgccaccgaggccaucgagaacauccggaccguggugagccugacccaggaaaggaaguucgaaagcauguacgucgagaagcuguacggccccuaccggaauagcgugcagaaggcccauaucuacggcaucaccuucagcaucucccaggccuucauguauuucagcuaugccggcuguuuucgauucggcgcauaccugaucgugaacggccacaugcgguucagggacgugauacugguguucucagcaaucguguucggcgccgucgcccugggccaugccucgagcuucgcccccgacuacgccaaagccaaacuguccgccgcccaccucuucaugcuguuugagcgccagccacugauagacuccuacagcgaggagggccucaaaccagacaaguucgagggcaauaucaccuuuaacgagguggucuuuaauuacccaacgcgagccaacguccccguccugcagggccugagccucgaggugaagaagggccagacccuggcccuggugggcagcagcggcugcgggaagagcacgguggugcagcuccucgagcgauucuacgacccucucgcgggaaccgucuucgucgacuucggcuuucagcugcucgacggucaggaagccaagaagcugaacgugcaguggcuaagggcccagcuggggauagugagccaggagccgauccucuucgacugcagcaucgccgagaauaucgcguauggcgacaacagcaggguggugagccaggacgaaaucguguccgcggcuaaggccgccaacauucaucccuucaucgaaacccucccccacaaguacgagacccgcgucggggacaagggcacccaacuguccggcggccagaagcaaaggauagccauugcccgggcccugaucaggcagccccaaauccugcugcuggaugaggcgaccucagcccuggacaccgagagcgagaagguggugcaggaggcccuggacaaggcccgugaggggcggaccugcaucgucaucgcgcaccgccuguccaccauccagaaugccgaccugaucgugguguuucagaacggcagggugaaggagcauggaacccaccagcaacuccuggcccagaagggaaucuacuucagcauggugagcguucaggccgguacccagaaucug

SEQ ID NO: 85 - RNA, 3858 nt, Artificial Sequence
  Synthetic Polynucleotide
auggaucuggaagccgccaagaacgggaccgccuggcggccuaccagcgccgagggcgacuucgaacuggggaucagcuccaaacagaagcgaaagaagaccaagaccgucaagaugauaggcguucugacccuguucagguacagcgacuggcaggacaagcuguucaugucccugggcaccaucauggccaucgcccacggcagcggccugccccugaugaugaucguguucggcgaaaugaccgacaaguucguggacacggccggcaacuucucguuucccguuaacuucagccugucgcugcugaaccccgggaagauacuggaggaagagaugaccagguacgccuacuacuacuccggccugggugccgguguccugguggccgccuacauccagguguccuucuggacccuggcugccgggcgccagauccggaagaucaggcagaaguucuuccaugcaauccugcggcaggagaucggcugguucgauaucaacgacaccaccgagcucaacacccgccugaccgacgacaucucaaagaucucggaggggaucggcgacaaagucggcauguucuuccaggccgucgccaccuucuucgccggcuucaucgucggcuuuauccggggcuggaagcugacgcuggugaucauggccaucucgcccauccuuggucuuagcgcggccgucugggccaagauacucagcgccuucuccgacaaggagcucgccgcguacgcgaaggccggcgccgucgccgaggaggcccugggcgccaucaggaccguuauagccuucggcggccagaauaaagaacuggaaagguaccagaagcaucuggagaaugccaaagagaucggcaucaagaaggccaucucggccaacaucuccaugggcaucgcauuccugcugaucuacgccagcuacgcccuggcguucugguauggcagcacgcugguuaucuccaaggaguacaccaucgguaaugcgaugaccguguucuucuccauacugaucggcgccuucuccguggggcaggccgcccccugcaucgacgccuucgccaacgccaggggcgccgccuacgucaucuucgacaucaucgacaacaaccccaaaaucgacagcuucucggagagggggcacaagcccgauagcaucaagggcaaccuggaauucaacgacgugcauuucuccuaucccucccgagccaacgugaagauccugaaggggcugaaccugaaggugcaguccggccagaccguggcccucgucggcuccagcggcugcggcaagagcaccaccgugcagcugauccagcgacuguaugauccggacgagggcaccauaaacaucgacggccaggacauccgaaacuuuaacgugaauuaccugcgcgagaucaucgggguggugagccaggaaccggugcuguucuccaccaccaucgccgaaaacauuuguuacgggaggggaaaugugaccauggacgaaaucaagaaggccgucaaggaggcgaacgccuacgaguuuaucaugaaacugccccagaaguuugacacgcuggugggggagcgaggcgcacagcugagcggcggccagaagcagcgcaucgccaucgcccgggcccucguaaggaauccaaagauucuccugcuggacgaggccaccagcgcccucgacaccgagagcgaggccgaggugcaggcggcccuggacaaggccagggagggccgcaccacgaucgugauagcucacaggcugagcaccgugaggaacgccgacgugaucgccgguuucgaggacggcgugaucguggaacagggcucccacuccgagcucaugaagaaggaagggguguacuucaagcuggugaacaugcaaacgagcggcagccagauacagagcgaggaguuugagcugaacgacgaaaaggccgccacccggauggcuccaaacggcuggaagagcaggcuguucaggcacucgacccagaagaaccugaagaacagccagaugugccagaaaagccuggacguggaaaccgauggcuuggaagcgaacgugcccccuguguccuuccucaaggugcucaagcugaacaagacggaauggcccuacuucguggugggcaccgugugcgccauugccaacggcggccuccagcccgcguucagugugaucuucagcgagauuaucgccaucuucggccccggugacgacgcggugaagcagcagaaaugcaacaucuucucccucaucuuccuguuccugggcaucaucagcuucuucaccuucuuccugcagggcuuuaccuucggcaaagccggagagauccugaccaggcggcugcgcuccauggccuucaaagccaugcugcgccaggacaugagcugguucgacgaccacaaaaacagcaccggcgcccugagcacccgccuggccaccgacgcggcccaggugcagggggccaccggaacccgacucgcccucaucgcccagaacaucgccaaucugggcaccgggaucaucaucuccuucaucuacggcuggcagcugacccugcugcugcuggccguggugcccaucaucgcggugagcggcaucgucgagaugaagcugcuggcagggaacgccaagagggacaagaaggaacuagaggccgccggcaagaucgcgaccgaggccaucgaaaacauccgcaccguggugucccugacccaggaacggaaauucgaguccauguacguggagaagcuguacggccccuaucggaacagcgugcagaaggcccacaucuacggcaucacguucagcaucucccaggcauucauguacuucuccuacgccgggugcuuccgguuuggcgccuaccugaucgucaacggucauaugagauuucgugacgugauacugguguuuagcgccaucgucuucggggccguggcccugggccaugccuccuccuuugcucccgacuacgccaaggccaagcucagcgccgcccaucuguucaugcucuucgagcggcagccccugauugacagcuauagcgaggaggggcucaagcccgacaaauucgagggaaacaucaccuucaacgaggugguguucaacuaccccacgcgugccaacgugccggugcugcagggacugucgcucgaggucaaaaagggccaaacccuggcgcugguggggagcagcgggugcggcaaaagcaccgucgugcagcugcuggagagguucuaugauccccuggccgggaccguguucguggacuuuggcuuucagcugcuggacggccaggaggccaagaagcugaacgugcaguggcugcgggcgcaguugggcaucgugagccaggagcccauucuguucgacugcagcaucgccgagaacaucgcguacggggauaacagccggguggucagccaagaugagaucguguccgccgccaaagccgcuaacauacaccccuucaucgaaacccugccucacaaguaugagacccgcguaggcgauaagggcacccagcuguccggcggucagaagcagaggaucgccaucgccagggcccugaucaggcagccccagauucugcugcuggacgaagccaccuccgcgcucgacacggaauccgagaaggucgugcaggaggcccucgacaaggcccgggagggccguaccugcaucgugaucgcccaccgccuguccacgauccagaacgccgaccugaucgugguguuccagaacggcagggugaaagagcacgggacucaucaacagcugcuggcccagaagggcaucuacuuuagcauggucuccgugcaggcgggcacccagaaucug

SEQ ID NO: 86 - RNA, 3858 nt, Artificial Sequence
  Synthetic Polynucleotide
auggaccuggaggccgccaaaaacgggaccgccuggaggcccaccagugccgagggcgauuucgagcucggcaucuccagcaagcagaagaggaagaagacuaaaaccgugaagaugaucggcguccugacgcucuuccguuacagcgacuggcaagacaagcuguuuaugagccugggcaccaucauggccaucgcccacgguagcggccugccccugaugaugaucguguucggcgaaaugaccgauaaguucgucgacaccgccggcaauuuuuccuuccccgugaacuuuucacugagccugcugaaccccggcaagauccuggaggaggaaaugaccagguaugccuacuacuauagcggccugggggccggggugcugguggcggccuacauccagguguccuucuggacccuggccgcggggcggcagauccgcaagaucaggcagaaguucuuucacgccauccugcggcaggagaucggaugguucgauaucaacgacacaaccgagcucaacacccgccugaccgacgauaucagcaaaauuagcgagggcaucggggacaagguaggcauguuuuuccaggccgucgcaaccuucuucgcgggcuucaucgugggcuucauccgcggcuggaagcugacccuggugaucauggcgaucagccccauccugggccugagcgccgcagugugggccaaaauccugagcgccuucagcgacaaggagcuggccgccuacgccaaggcgggggcgguggccgaggaggcccucggggccaucaggaccgugaucgccuucggcggucaaaacaaggagcucgagagguaucagaagcaccuggagaaugccaaggagaucgggaucaaaaaggccaucuccgccaacaucagcaugggcaucgccuuccugcugaucuaugccagcuacgcccuggccuucugguacggauccacucucgugaucagcaaggaguacaccaucggcaacgccaugaccguguucuucucaauacugaucggggccuucagcgugggccaggccgcccccugcaucgacgccuucgccaacgccaggggagccgccuacgugauuuucgacaucaucgauaacaaccccaaaaucgacagcuucagcgagaggggccacaagcccgacucaauaaagggcaaccuggaguucaaugacguccacuuuagcuaccccagcagggccaacgugaagauccugaagggccucaaccugaaggugcagagcggccagaccguggcccugguaggcagcuccgggugcgggaaauccaccaccgugcagcuuauccaaaggcuguacgaucccgacgagggcaccaucaacaucgacgggcaggacauuaggaauuucaacgugaacuaccucagggaaaucaucggagucgugucccaggagccggugcuguuuuccaccaccauugccgagaauaucugcuauggucggggcaacgucacaauggacgagaucaagaaagcugugaaggaggcaaacgccuacgaguucaucaugaaacugccccagaaguucgacacccuggucggcgagaggggggcccagcucucgggggggcagaagcagaggaucgccaucgcgagggcacucgugaggaaccccaagauccugcugcucgaugaggccaccagcgcccuggacaccgagagcgaggccgaagugcaggcggcccuggacaaagccagggagggccgcaccaccaucgucaucgcccacaggcucagcaccgugcggaacgccgacgugaucgccggcuuugaggacggcgugaucguagagcagggcucccacagcgagcugaugaagaaagagggcguguacuuuaagcuggugaacaugcagacgagugggagccagauccaguccgaagaguucgagcugaaugaugaaaaggccgccaccaggauggcccccaacggauggaagucccgacuguucaggcacagcacccagaagaaccugaaaaacagccaaaugugccagaaaucccuggacgucgaaaccgacggccuggaggccaacgugccgccggugagcuuuuugaaggugcugaagcugaacaaaacagaguggcccuacuucguggucggaaccgucugcgccaucgccaauggcggccugcagcccgccuucagcguaaucuuuagcgagaucaucgccaucuucggccccggcgacgacgccgugaagcaacagaaguguaacaucuucucccugaucuuucucuuccuuggaaucauuagcuucuuuaccuucuuccuccaaggguucaccuucgggaaggcuggggagauccucacgcgccggcugcggagcauggccuucaaggccaugcugaggcaggacaugagcugguuugacgaucacaagaacuccaccggugcccugagcaccaggcuggccacugacgccgcccagguccagggggccaccggaacgcggcuggcccugaucgcccaaaacaucgccaaccugggcacgggaaucauaaucagcuucaucuacggauggcaacugacccugcugcuccuggccguggugcccaucaucgccgugagcgggauagucgaaaugaagcugcuggcggggaacgccaagcgggacaaaaaggagcuggaggccgccggcaagaucgcaaccgaagccaucgagaacauacguaccguggugagccugacucaagaaaggaaguuugagagcauguacguggaaaaacuguacggccccuaccguaacuccgugcagaaggcccauaucuacgggauaacuuucuccaucagccaagccuucauguacuuuagcuacgccgggugcuucagguucggugccuaccugauugugaacggccacaugagguuccgggacgugauccugguguucuccgcgaucgucuucggcgccguggcccugggucacgccagcagcuucgcccccgauuacgccaaggccaaacucagcgccgcgcaccucuucaugcuguucgagaggcagccacugaucgacucguacuccgaggagggacugaagccugacaaguucgaaggcaauaucacuuuuaacgaggugguguucaauuaccccacccgggccaacgugcccgugcugcaggggcugagccuggaggugaagaaggggcagacccuggcccucgucggcagcagcggcuguggcaaauccaccguggugcagcugcuggagcgguucuacgacccccuggccggcaccguguucguggauuucggcuuucaacugcuggacgggcaggaagccaagaagcugaacguccaguggcugagggcccagcuggggaucgugagccaggagcccauccuguucgacugcagcaucgccgaaaacaucgccuacggcgacaacuccaggguggucagccaggacgaaauagucuccgccgccaaggcggcgaacauccacccuuucaucgagacccucccccacaaguacgaaacuagggucggagacaaaggaacccagcugagcgggggccagaagcagcggaucgccaucgccagggcccugauccgacaaccacagauucugcuccuggaugaggccacguccgcccuggacaccgaguccgagaaaguggugcaggaggcccuggacaaggccagggagggccguaccugcaucguuaucgcccacaggcugagcaccauccagaacgccgaccucauagucguguuccaaaacggccgagucaaggaacacggcacucaccagcagcuccuggcccaaaagggcaucuacuucuccauggugagcgugcaggccggcacccagaaccug

SEQ ID NO: 87 - RNA, 3858 nt, Artificial Sequence
  Synthetic Polynucleotide
auggaccucgaggcggccaaaaacggaaccgccuggaggcccacaucggccgagggcgacuucgagcugggcaucagcagcaaacagaagcgcaagaagaccaagaccguaaagaugaucggggugcugacccuguucagguacuccgacuggcaggacaaacuguucaugagucucgggaccaucauggccaucgcccacgguagcgggcugccgcucaugaugaucguguucggggagaugaccgacaaauucguggacaccgcgggcaacuucuccuuccccgugaauuucucccugagccuccugaaccccgggaagauccuggaggaggagaugacgcgguaugcauacuacuacagcggccugggugccggcgugcucguggccgccuauauccaagugagcuucuggacccuggccgccggaaggcagaucaggaagauccgucagaaguucuuccacgccauccugaggcaagagaucgggugguucgacaucaacgacacaacagagcugaacacccgccugaccgacgacaucuccaaaaucuccgaaggcaucggcgacaaggucggcauguuuuuccaggccguggccaccuucuucgccggcuuuauugugggcuucauccgcggauggaagcugacgcucgugaucauggccaucagcccgauacucgggcugagcgccgccgugugggccaagauccugagcgccuucagcgacaaggagcucgccgccuacgccaaggccggugccguggccgaggaggcccugggagccaucaggaccgugaucgccuucggcggucagaacaaagaacuggagagguaccagaagcaccucgagaacgcgaaggagaucggcaucaagaaggccaucagcgccaacaucagcaugggcaucgccuuccugcugaucuacgccagcuacgcgcuugccuucugguacggcuccaccuuagugaucagcaaagaguauaccaucgggaaugccaugacgguguuuuucuccauccugaucggagccuucagcgucgggcaagccgccccaugcaucgacgccuuugccaacgcccgcggcgccgccuacguaaucuucgacaucaucgacaacaaccccaagaucgacagcuucuccgagcgggggcacaagccggauuccaucaaggguaaccuggaguucaacgacguccauuucagcuaucccagccgagccaacgucaagauccucaagggucugaaccucaaagugcagagcggccagaccguggcgcuggugggaagcuccggcugcggcaagagcaccaccgugcaacugauccagcggcuguacgacccagacgaaggcaccaucaacaucgacggccaagacaucaggaauuucaacgugaacuaccugagggaaauaaucgguguggugagccaggagccgguucucuucagcaccacuauugccgagaacaucuguuacggccgaggcaacgugaccauggaugagaucaagaaggccgugaaggaggccaacgccuacgaauucaucaugaagcugccccagaaguucgacacccuggugggcgagaggggggcccagcugucaggcggccagaaacagaggaucgcgaucgcccgggcccuggugaggaaccccaagauccugcugcuggacgaagcgaccagugcccuagacacagagagcgaggccgagguccaggccgcccuggacaaggcccgggagggcaggaccaccauugugaucgcccaccggcucagcacugugcggaacgccgacguaaucgccggauucgaagacggugugaucguggagcagggcagccacagcgagcugaugaagaaggaggggguguauuucaagcuggugaacaugcagaccagcggcagccagauucaguccgaggaguucgagcugaacgaugagaaagccgccaccaggauggcgcccaacggcuggaagucgaggcucuuccggcacuccacccagaagaaccugaagaacagccagaugugccagaagagccucgacguggagacggacggccuggaggccaaugucccccccgugagcuuccucaagguccugaagcugaauaagaccgaauggcccuacuucgugguggguaccgucugcgccaucgccaauggcggccugcagcccgccuuuagcgugaucuucuccgaaaucaucgccaucuucggccccggggacgacgccgucaaacaacagaagugcaacauauucucccucaucuuccuguuucugggaaucaucagcuucuuuacguucuuccugcagggcuucaccuucggcaaagccggcgagauccugaccaggaggcugaggagcauggccuuuaaggcuaugcucaggcaggacaugagcugguucgacgaccauaaaaacagcaccggcgcccuguccacccgucuggccacugacgccgcgcaaguacagggggccaccgggacccgacucgcgcuaaucgcccagaacaucgccaaccugggcaccggcaucauuaucucuuucaucuacggcuggcagcugacccuccugcugcucgcuguagugcccaucaucgccgugucggggaucguggagaugaagcugcuggccggcaacgccaagagagauaagaaggagcuggaagccgcggggaagaucgccaccgaagccauagagaacaucaggacgguggugagccucacccaggagcguaaguucgagucgauguacguggaaaagcuguacgggcccuacaggaacagcgugcagaaggcccacauuuaugggaucaccuuuagcaucagccaagccuucauguacuucagcuacgccggaugcuuuagguucggcgcguaccugaucgugaacggacacaugagguuccgugacgucauccucgucuuuuccgccaucgucuucggcgcaguggcccuggggcacgccagcaguuucgcccccgauuacgccaaggccaaacugagcgccgcccaucucuucaugcuguucgagaggcagccccugaucgacagcuacagcgaggaaggccucaagccugacaaguucgagggcaacaucaccuucaacgaggucguguuuaauuaccccacacgagccaacguacccgugcuacaaggccugucgcuggaggugaagaaggggcagacccuggcccuggugggcuccagcgguugcggcaagagcaccgucgugcagcugcuggagcgguucuacgacccccuggccggaaccguguucguggacuuuggcuuccagcuccuggacggccaggaggccaagaagcucaacgugcaguggcucagggcccagcucggaaucgugagccaagaacccauccuguucgacuguagcaucgccgagaacaucgccuauggggacaacagccgggucgugagccaggaugaaaucgugagcgcggcaaaggccgcaaauauacaccccuucaucgaaacccugccccacaaguacgagacccgggugggcgacaaggggacccagcugagcggcggccagaagcagcgcaucgccaucgcccgggcccugauccggcagccccagauccugcugcuggaugaagccaccucagcccuggacaccgagagcgagaaggugguccaagaagcccuggacaaggcccgugagggccggaccugcaucgugauagcccacaggcugagcaccauccagaacgccgaccucaucgugguguuccagaacgggcgggugaaggagcacgggacccaucagcagcugcuggcccagaaaggcaucuacuucuccauggucagcgugcaggccgggacgcagaaccug

SEQ ID NO: 88 - RNA, 3858 nt, Artificial Sequence
  Synthetic Polynucleotide
auggaccuggaggccgccaagaacggcaccgccuggaggcccaccagcgccgagggggacuucgagcuggggaucagcagcaaacaaaaacgaaagaagaccaagaccgugaagaugaucggaguccugacccuuuuuagguacucggacuggcaggacaagcucuucaugagccugggcaccaucauggccaucgcccacggauccgggcugccccugaugaugaucguauucggagagaugaccgacaaguuuguggacacggcggggaacuucagcuuccccgugaacuucucccugagccugcugaaccccggcaagauccucgaggaggagaugacccgguacgccuacuacuacagcgggcugggcgccggggugcugguggccgccuacauccaagugagcuucuggacccuggccgccggaaggcagaucaggaagauccgccaaaaguuuuuccaugccauccuccggcaagaaaucggcugguucgauaucaacgacaccaccgaacugaauacgagacugaccgaugauaucagcaagauauccgagggcaucggcgacaagguggggauguucuuucaggcuguggcgaccuucuucgcgggcuucauagugggcuucaucaggggcuggaaguugacucuggucaucauggcgaucucccccauccugggccugagcgccgccguaugggccaagauucugagcgccuuuuccgacaaggagcuggccgccuacgccaaggccggugccgucgcagaagaggcccugggggcgaucaggaccgugaucgccuucggcgggcagaauaaggagcuggaaagguaccaaaagcaccuggagaacgccaaggagaucggcaucaagaaggccaucagugccaacaucuccauggguaucgccuuccuccugaucuacgccuccuacgcccuggccuucugguacgggagcacccuggugaucuccaaggaguacaccaucgggaacgccaugacaguguucuucagcauccugaucggugccuucucggugggccaggccgccccgugcaucgacgccuucgcgaacgcccggggcgccgccuacgugauuuucgacaucaucgauaacaaccccaaaauagacucuuucagcgagcgcggccacaagcccgacuccaucaaaggcaaccucgaguucaacgacgugcacuucagcuacccauccagggccaacgugaaaauccugaagggccugaaccugaaggugcagagcggccagaccguugcccuggugggauccucaggcugcggcaagagcaccaccgugcagcugauccagcggcuguaugaucccgacgaagggaccaucaacaucgauggccaggacaucaggaacuucaacgugaacuaucugagggagauuaucgggguggucagccaagagcccgugcuguucagcaccaccauagccgaaaacaucuguuacgggaggggcaacgucacuauggacgagaucaaaaaggccgucaaggaagccaacgccuacgaguucaucaugaagcugccccagaaauucgacacccuggugggcgagaggggggcccagcugagcgggggccagaagcagaggaucgccaucgccagagcccugguccggaaccccaaaauccugcugcuggacgaggccaccuccgcccucgacacggaguccgaggccgaggugcaggccgcccuggacaaggcccgcgagggccguaccacgaucgucauugcccacaggcucucaaccgugaggaacgccgacgugaucgccggcuucgaggacggcgucaucguggagcaggguucucacucagagcucaugaaaaaggagggcguguacuucaagcuagugaauaugcaaaccagcggcagccagauccagagcgaggaguucgagcugaacgacgagaaggccgccacccggauggcccccaacggcuggaagagccgccucuucaggcauagcacccagaaaaaccucaagaacucgcagaugugccagaagucccuggacgucgaaaccgacggccuggaggccaacgugccccccgugaguuuccuuaagguccugaagcugaacaagaccgaguggcccuacuucguggugggaaccgugugcgccaucgccaacggcgggcuccagcccgccuucagcgugauauucagcgagaucaucgccaucuuuggucccggcgacgacgccgugaagcagcaaaagugcaauaucuucagccugauauuccuguuccugggcaucaucagcuucuuuaccuuuuuccugcagggguuuaccuucggcaaggccggggagauccugacgcgccgccugaggagcauggcguucaaggccaugcuccgccaggacauguccugguuugacgaccacaagaauagcaccggcgcccugucgacacggcucgccaccgaugccgcccagguccagggcgccaccgguacuaggcuggcccucaucgcgcagaacaucgccaaccuggggaccggcaucaucaucagcuuuaucuacggcuggcagcugacccugcugcugcuggccgugguccccauaaucgccgucagcggcaucguggagaugaagcugcuggcgggcaacgccaagagggacaagaaggaacuggaggccgccgggaagaucgccacggaggccaucgagaacaucaggaccguggugucccugacccaggagaggaaguuugaguccauguacgucgagaagcuguacggccccuacaggaacagcgugcagaaggcccacaucuacggcaucaccuucuccaucagccaggccuucauguauuucagcuacgccggcugcuucagguucggggccuaucugaucgugaauggccacaugagguuccgggacgucauccugguguucucagccaucguguucggcgccguggcgcugggccacgccagcagcuucgcgcccgacuaugccaaggccaagcuguccgccgcccaccuguucaugcuauucgagcggcagccccucauagacagcuacuccgaggaggggcugaagcccgauaaguucgagggcaacaucacguucaacgaggugguguuuaacuacccgacccgggccaacgugcccgugcugcaggggcucagccuggaggugaaaaagggacagacccuggcccuggugggcuccagcggcugcgggaagagcaccguggugcagcugcuggagagguucuacgauccccuggccggcaccgucuucguggacuucggcuuccagcugcucgacggccaggaggccaagaagcugaacgugcagugguugcgggcccaacucgggaucgugagccaggagcccauacuguucgacugcagcaucgccgagaauauagccuacggcgacaacagccgcgucgucagccaagacgagaucgugagugccgccaaggccgcgaacauccacccauuuaucgagacgcugccgcacaaauaugagacccgggugggcgacaagggcacccaacuguccggugggcagaagcagcgcaucgccaucgccagggcccugauccgccaaccccagaucuugcugcuggacgaggccaccucggcgcuggacaccgaauccgagaaggugguucaggaggcccuagacaaggcccgagagggcaggacgugcaucgucaucgcccaccgacuguccaccauccagaacgccgaccugauugugguguuccagaacggccgcgugaaggagcacgggacccaccagcaacugcuggcccagaaaggcaucuacuuuaguauggucagcgugcaggcgggcacucagaaccug

SEQ ID NO: 89 - RNA, 3858 nt, Artificial Sequence
  Synthetic Polynucleotide
auggaucucgaggccgccaagaacggaaccgccuggcgccccaccagcgccgagggggauuucgagcugggcaucagcuccaagcagaagaggaagaagaccaagacggugaagaugauuggagugcugacccuguuccgcuauuccgacuggcaggacaagcuguucaugagccuggggaccaucauggcgaucgcccacggcagcggccugccgcugaugaugaucguguucggcgaaaugaccgauaaguuuguugauaccgccggcaacuucagcuuccccgugaacuucagccuaagccuucugaaccccggcaaaauccuggaagaggagaugacccgcuacgccuacuacuauagcggccuaggcgccggggugcugguggccgccuacauccaggucuccuucuggacccuggccgcaggcaggcagauccgaaagaucaggcaaaaguucuuccacgccauccugcggcaggaaaucggcugguucgacaucaaugacaccaccgagcugaacacccgccugaccgacgauaucagcaagaucuccgaaggcaucggcgauaaggugggcauguuuuuccaggccguggccacauucuucgccggauucaucgucggcuucauccgagguuggaaacugacgcucgugaucauggccaucagccccauccucggccugagcgcggccgucugggccaagauucuguccgccuucucggauaaggagcuggccgccuacgccaaggccggggccguggccgaagaggcccugggcgccauccggaccgugaucgcauucgggggccagaauaaagagcuggagcgcuaccagaaacaucuggagaacgccaaagaaaucggcaucaagaaggcaaucagcgccaacaucagcaugggaaucgccuuucuccugaucuacgccagcuacgcccucgccuucugguacgguuccacccuggugaucagcaaggaguacaccaucggcaacgccaugaccguguucuucucgauccugauuggggccuucagcgugggccaggccgcgcccugcaucgacgccuucgccaacgcccgcggcgccgccuaugugaucuucgacaucauagacaauaaucccaaaaucgacagcuucuccgagcgcggccacaagccggauagcaucaagggcaaucuggaguuuaacgacgugcacuucuccuaccccagccgggccaacgugaagauccugaaagggcugaaccugaaggugcagagcggccagaccguugcccuggucggcuccuccgggugcggcaagucgaccacugugcagcugauccaacggcuguacgaccccgacgaaggcacgaucaacaucgacggacaggacauccguaacuucaaugugaacuaccugcgcgaaaucaucgguguggugagccaggagcccgugcuguucagcaccaccaucgccgaaaacaucugcuacggucggggcaacgugaccauggacgagaucaaaaaagccgugaaagaggccaaugccuacgaguucaucaugaagcugccacagaaauuugacacccuggugggcgagaggggcgcgcagcugagcgggggccaaaagcagcgaaucgccaucgcuagggcgcucgugaggaacccgaagauccugcugcuggacgaggccaccuccgcccucgacaccgaaagcgaggccgagguccaggccgcccuggacaaggcccgggaggggaggaccaccauagugauagcccauaggcugagcaccgugaggaacgccgacgugaucgccgguuucgaagauggggugaucgucgagcagggcagccacagcgagcucaugaagaaagagggcgucuacuucaagcuggugaacaugcaaaccuccgggagccagauacaguccgaggaguucgagcucaacgacgagaaagccgccaccaggauggcccccaacggcuggaaaagccggcucuuccgccacuccacccaaaaaaaccugaagaacagccagaugugccagaaaagcuuggacguggagaccgacggccuggaggccaacgugcccccgguguccuuccugaaggugcugaagcugaacaaaaccgaguggcccuacuuugucgugggcaccgugugcgccaucgccaacggaggccugcaacccgccuucuccgugaucuucagcgagaucauagccaucuucggacccggcgacgacgccgucaagcagcagaagugcaauaucuucagccugaucuuccuguuccugggcaucaucuccuucuuuaccuucuuccuacagggauucaccuucggcaaggccggcgagauccucacccguaggcuccggagcauggccuuuaaggccaugcugcgucaagacaugagcugguuugacgaucacaagaacagcaccggcgcccugagcacccgacuggcaaccgacgccgcucaggugcagggcgccaccggcacccggcuggcucugaucgcccagaacaucgccaaucugggcacuggcaucaucaucuccuucaucuacggcuggcagcugacccugcuucuccuggccguggugccgaucaucgccguguccggcaucguggagaugaagcugcuggccggcaacgccaagagggacaagaaggagcuggaggccgccggcaagaucgccaccgaggccaucgagaacauccggaccguggugagccugacgcaggagaggaaguucgagagcauguacguggagaagcucuacggacccuaccguaacagcgugcagaaggcccacaucuacggcaucaccuucagcaucagccaagccuucauguacuuuuccuacgccggcugcuuucgguuuggcgccuaucugaucgugaacggccacaugagguuucgggacgugauccuggucuucuccgccaucguguuuggcgcggucgcccucggacacgcgagcagcuuugccccggauuaugcgaaggccaagcugagcgccgcccaccuguucaugcuguucgagaggcagccccugaucgacagcuacagcgaggaggggcugaagcccgauaaauuugagggcaacaucaccuuuaacgaggugguguuuaacuaccccacccgggcgaacgugcccgugcugcaaggccugagccucgaggucaagaaaggacaaacccuggcgcugguggggagcagcggcugcggcaagagcaccguggugcagcugcuggagcgguucuacgacccccuggccgggacgguauucgucgauuucggguuccagcuucuggacggccaggaggccaagaagcugaacgugcaguggcugagggcccagcuggguauagucagccaggagcccauacucuucgacugcagcaucgccgagaacaucgccuacggggacaacucgcgggucgucucccaggacgagaucgugagcgccgccaaggccgccaacauacaccccuucaucgagacacugccccacaaguacgaaacccgggugggcgacaagggcacccaacugagcggcggacagaagcagcgcaucgccaucgcccgagcgcugauccgccagccccagauccugcugcucgacgaggccacgagcgcccucgacaccgagagcgagaagguggugcaggaggcccucgacaaggcccgggagggcaggacgugcaucgugaucgcccacaggcugagcaccauccagaaugccgaccucaucgucguguuccagaacgggcgggucaaggagcacggcacccaucagcagcugcuggcccagaagggcaucuauuucagcaugguuuccgugcaggccgggacccagaaccug

SEQ ID NO: 90 - RNA, 3858 nt, Artificial Sequence
  Synthetic Polynucleotide
auggaccucgaggccgccaagaacggcacugccuggcggccaaccagcgccgagggcgacuucgagcugggcaucuccagcaaacagaaaaggaagaagaccaagaccgugaagaugaucggcguccugacgcuguuucgguacagcgauuggcaggacaagcuguucaugucgcugggcaccauuauggccauagcccauggcuccggccucccccucaugaugaucguguucggcgagaugaccgacaaguuuguggacaccgccggaaacuuuagcuuccccgugaacuucucccugagccuccugaacccaggcaagauccuggaggaagagaugacccgguacgccuacuauuacagcggccugggcgccggcgugcuggucgccgccuacauccaggugagcuucuggacccuggccgccggccggcaaauacggaagauacgccagaaguuuuuccacgccauccugaggcaagagaucgggugguuugacaucaaugacaccaccgagcugaacacacgacugacugacgacaucuccaagaucuccgaggggaucggcgacaaggugggcauguucuuccaggccgucgccaccuucuucgccggguucauaguggguuucauccgcggcuggaagcugacccuggugaucauggccaucagccccauacugggccugagcgccgccgugugggccaagauccuguccgccuucagcgacaaagagcucgccgcauacgccaaggccggcgcggucgccgaggaggcccucggagcgauccgcaccguaaucgccuuuggcgggcagaacaaagagcuugaaagauaccagaagcaccuugaaaaugcgaaagaaaucggcaucaagaaggccaucuccgccaacauauccaugggcaucgcguuccuccugauauacgccuccuacgcccucgccuucugguacggcagcacccuggugaucuccaaggaauacaccaucggcaacgccaugaccgucuucuucucgauccugaucggcgccuucagcgugggccaggccgcccccugcaucgacgcguucgccaacgccaggggggccgccuacgugaucuucgauaucaucgacaacaaccccaagaucgacuccuucagcgagagggggcacaagccggacagcaucaagggcaaccuggaguucaacgacgugcacuucucguaccccagccgcgccaacgugaagauccuuaaaggccucaaccugaagguccagagcgggcagaccguagcccuggugggcagcucaggcugcggaaaaucgaccaccgugcagcugauccagcgacucuacgaccccgacgagggcaccaucaacaucgacggccaagacauccgaaauuucaacgugaacuaccugcgggagaucaucggcguggugagccaggagcccgugcucuucagcaccaccaucgccgagaacaucuguuacggucgcggcaacgugaccauggaugagaucaagaaagccgucaaggaagccaacgccuacgaauuuaucaugaagcugccccagaaguuugacacgcuggugggcgaaaggggcgcccagcuguccggcgggcagaagcaacggaucgccaucgcccgagcccuggucaggaaccccaagauccugcugcuggacgaagcgaccagcgcccuggacacagagagcgaggccgaggugcaggcagcccuggacaaggcccgcgagggccggaccacuaucgucaucgcucacaggcuguccaccguaaggaacgccgacgugaucgccggguucgaggacggagugaucguggagcagggcucccacuccgagcugaugaagaaggagggcguguacuucaagcuggugaauaugcagaccucgggcagccaaauccagagcgaggaguucgaacugaaugacgagaaagcggccacccgcauggcgcccaacggcuggaagagccggcuguuuaggcacuccacccagaagaaccugaaaaacucccagaugugccaaaagagccuggacguggagaccgacgggcuggaagccaacgugccccccgugucguuccugaaggugcucaaacugaacaagaccgaguggcccuauuucguggugggaaccgugugcgccaucgccaauggggggcugcaacccgccuucagcgucaucuucagcgagauaaucgcgaucuucggccccggggacgacgccgugaagcagcagaagugcaauauuuucucccugaucuuccucuuccugggcaucaucagcuucuucaccuucuuccugcagggcuucaccuucgggaaggcgggcgagauccucaccaggcgccugcgguccauggccuucaaggcgaugcugcgccaagauaugagcugguucgacgaccacaagaacuccacuggcgcccugagcacgcgccucgccaccgacgccgcacagguccagggggccaccggcacccggcucgcccugaucgcccagaacaucgccaaccugggcacgggaaucaucauaucauucaucuacggcuggcagcugacccugcugcuccuggccguggugccgaucauagcggugagcgggaucguggagaugaagcugcuggccgguaaugccaagagggacaaaaaagagcuggaggccgccggcaagaucgccaccgaagccaucgagaacaucaggaccguggucagccugacgcaggagaggaaguucgaauccauguacguggaaaagcuguacgggcccuacaggaacagcgugcagaaggcccauaucuacggcaucaccuucagcaucucccaggcguucauguacuucagcuacgccgggugcuuccgguucggugccuaccugaucgugaacggccacaugcgguuuagggaugugauacuggucuuuagcgccaucguauucggcgccguggcgcugggccacgccagcagcuucgcccccgacuacgccaaggccaaacuguccgccgcccaccucuuuaugcuguucgagaggcagccccucaucgacuccuacagcgaggagggccucaagcccgacaaauucgaagggaacaucacguuuaacgaagugguguucaacuaccccaccagggcgaacguccccguguugcagggccugagccuggaagugaagaagggccagacgcucgcccuggugggcagcagcggcugcgguaaaagcacuguggugcaacugcuggagagguucuaugacccucuggccggcaccguguucgucgacuucggguuucagcugcuggacggccaggaggccaagaagcugaaugugcaguggcugagggcgcagcugggcaucgugagccaggagccgauacuguucgacuguagcaucgccgagaacaucgccuauggcgacaacagcagggucgugucccaggacgaaaucgugagcgccgccaaggccgccaacauccaccccuuuaucgagacccugccccauaaauaugagaccagggugggugacaagggcacccaacuguccggcggacaaaagcagaggaucgccaucgccagggcccuaauaaggcagccccagauccuccuccuggacgaggccaccagcgcgcucgauaccgagagcgagaaggugguacaggaggcccuggauaaggcccgggagggcaggaccugcaucgugaucgcccauaggcuguccaccauucagaacgccgaccugaucguggucuuccagaacggcaggguaaaagagcacggcacccaccagcaacugcuugcgcagaagggcaucuauuuuagcauggugucagugcaggccgggacccagaaccug

SEQ ID NO: 91 - RNA, 3858 nt, Artificial Sequence
  Synthetic Polynucleotide
auggaccuggaagcggccaagaacgguacggccuggaggcccaccagcgccgagggagacuucgagcugggcaucucguccaagcaaaagaggaaaaaaacgaagaccguuaagaugaucggcguacucacccuuuuuagguacuccgauuggcaggacaagcuguucaugucccuggggacaaucauggccaucgcgcacggcuccggucugccccugaugaugaucguguucggcgaaaugaccgacaaauuuguggacaccgccggcaacuucagcuuccccgugaauuucagccugagccuccugaaccccggcaaaauccucgaagaggaaaugaccagguaugcuuacuauuacagcggccugggugccggcguacugguggccgccuacauccaggucagcuucuggacccuugccgccggccgacagaucaggaagaucaggcaaaaguuuuuccacgccauacugcgccaggagaucgggugguucgacaucaacgacaccaccgaacugaacacacggcugacggacgacaucagcaagaucuccgagggcaucggggacaaggugggcauguucuuccaggcgguggccaccuucuucgccggcuuuaucgugggcuucauccgcggguggaagcuuacccuggucaucauggcgaucucgcccauccugggccucucggccgcggugugggccaagauccugagcgcauucucggacaaagagcuggcggccuacgccaaagccggcgccguggccgaggaggcccugggcgccauccggaccgucaucgccuuugguggccagaacaaggagcuugagagguaccagaagcaccuggagaacgccaaggagaucggcaucaagaaggcgaucagcgccaacaucuccaugggcaucgccuuucugcugaucuacgccucguacgcccuggcauucugguacggcagcacccuggucaucagcaaggaguacaccauaggcaacgccaugaccguguucuucuccauccugaucggagccuucagcgugggccaggcugcccccugcaucgacgccuucgccaaugccaggggcgcggcguacgugaucuucgacauaaucgauaacaaccccaagaucgacuccuucagcgagcggggccacaagccugacagcaucaaggguaaucuggaguuuaaugacgugcacuucagcuacccaagccgcgccaacgucaaaauccugaaggggcugaaccugaaagugcagagcgggcagaccguggcccugguggguagcuccgguuguggcaagagcaccaccguccagcugauccagaggcuguacgaccccgacgagggcacgaucaauaucgacggccaagacauccgcaacuucaacgucaauuaccuccgcgagauuauaggaguggucagccaggagcccgugcuguucuccaccaccaucgccgagaacaucugcuacggccgcggcaaugucaccauggacgagaucaagaaggccguuaaggaggcuaacgccuacgaguucaucaugaagcugccccagaaguucgacacccuggugggcgagaggggcgcccagcugagcggcggacaaaagcagcgcaucgccauagcgagggcacuggugaggaaccccaagauccugcugcuggacgaggcgaccuccgcccuggacacggagagcgaggccgaggugcaagccgcccucgacaaggccagggaaggcaggaccaccaucgucaucgcccacaggcugagcaccgugaggaacgccgacguuaucgccggguucgaggacggcguaaucgucgagcagggcagucacagcgagcucaugaagaaggagggcguguacuucaagcucgucaacaugcagaccagcgggagccaaauccaaagcgaagaauucgagcugaacgaugagaaagccgccaccaggauggcacccaacggguggaagagccgccucuuuaggcacuccacucagaagaaccugaagaacagccagaugugucagaagagccuggacguggagaccgacggacucgaagccaacguccccccagucagcuuucugaaagugcugaagcucaacaagaccgaguggcccuacuucguggucggcacggugugcgccauagccaacggcggccugcagcccgccuucagcgugaucuucagcgagaucaucgccaucuuuggccccggcgacgacgccgugaaacagcagaagugcaauaucuucucccugaucuuccuguuccuggggauaaucagcuuuuuuaccuucuuucugcagggguucaccuuuggcaaggccggagagauccucacgcggcgccugcguuccauggcguucaaggcaaugcuccgacaggacaugaguugguucgacgaccacaagaacagcaccggcgcccuguccaccaggcuggccaccgaugccgcccaggugcagggagccaccgggaccaggcuggcccucaucgcccagaacaucgccaaucugggcaccgguaucaucaucagcuuuaucuacggguggcagcugacccugcugcuccucgccgugguucccaucaucgccgugagcggcaucguggagaugaagcugcuggccggcaacgccaagagggauaagaaggaacuggaagccgccggcaagaucgccaccgaggccaucgagaacauacggaccgucgucucccugacccaggagcggaaguucgagagcauguacguggaaaagcucuacggucccuauaggaauagcgugcagaaggcccacaucuacgggaucacguucagcaucagccaggccuucauguacuucagcuacgccggcugcuuccgguucggagccuaucugauagucaacggucacaugagguuccgagacgugauccugguguucucugccaucguguucggcgccguggcgcugggacacgcguccuccuuugcccccgacuacgcgaaggccaagcugagcgccgcccaccuguucaugcuguucgagaggcagccccucaucgacagcuauuccgaagagggccugaagcccgacaaauucgagggcaacaucaccuucaaugaggugguauuuaacuaucccacccgagccaacguccccgugcugcaggggcugucccucgaggugaagaaggggcaaacccucgcccugguggggagcagcggcuguggcaaaagcaccguggugcagcuccuggagagguucuacgacccccuggccggcaccguguuuguggacuucggauuccagcugcuggacggccaggaggccaaaaagcugaaugugcaguggcugcgggcccagcuggguaucgucagccaggagccgauccuguucgacugcucaaucgccgagaauaucgccuacggcgacaacagcagggucgugucccaagaugaaaucgugagcgcggccaaggcggcuaacauccaccccuuuaucgagacccugccucacaaguacgagacccgcgugggcgacaagggcacccagcugagcgggggccagaagcagcgaaucgccaucgccagggcccugauccggcagccccagauccugcuguuggaugaggccaccagcgcccuggauaccgagagcgaaaaggugguccaggaggcccuggacaaggcgcgggaggggcggaccugcaucgugauugcccaccggcugucgaccauccagaacgccgaccugaucgugguguuccagaacggcagggugaaagagcacgggacccaccagcagcugcuggcgcagaaggggaucuacuucucaauggugagcguccaggccgggacccagaaccug

SEQ ID NO: 92 - RNA, 3858 nt, Artificial Sequence
  Synthetic Polynucleotide
auggaccuggaggccgccaaaaacggcaccgccuggagacccaccucagccgagggcgacuucgagcucggaaucagcagcaagcagaagcgcaagaaaaccaagacagugaagaugaucggggugcucacccuguucagguacagcgacuggcaagacaagcuguucaugucccugggaaccaucauggccaucgcccauggcucuggccugccacucaugaugaucguguucggcgagaugaccgacaaguucguggacaccgccgggaauuucagcuuccccgugaacuucagccugagccugcugaaccccggcaagauccucgaagaggagaugaccagguacgccuacuacuacagcggccucggcgcagggguccugguggccgccuauauccagguguccuucuggacgcuggccgccggcaggcagauccggaagauccgacagaaauucuuccacgccauccugaggcaggaaauaggcugguucgauaucaaugauaccacggaacugaacacccggcugaccgacgacaucagcaaaaucagcgagggcaucggggauaaagugggcauguucuuccaggccguggccaccuuuuuugcaggcuucaucgucggcuuuaucaggggcuggaagcugacccuggucauaauggccaucagccccauccugggccucagcgcagccgugugggccaagauccuguccgccuucagcgacaaggagcuggcggcguacgccaaagccggggcgguggccgaggaggcccugggugccauccguaccgugaucgccuucggcggccagaacaaggagcuggagagguaccagaagcaccuggagaacgccaaggagaucggaaucaagaaggcuaucagcgccaacaucuccauggggauugccuuccugcugaucuacgccuccuacgcccuggccuucugguacggcuccacgcuggugaucagcaaggaguacaccaucgggaaugccaugaccgucuucuucagcauccugaucggugcguucagcguggggcaggccgcccccugcaucgacgccuucgccaacgccaggggagcggccuacgugaucuucgacaucaucgacaauaacccgaaaauagacagcuucagugagaggggccacaagccggauagcaucaagggcaaccuggaguucaacgacgugcacuuuuccuaccccagccgcgccaacgugaagauccugaagggucuuaaccugaaggugcagagcggccagaccgucgcccucgugggcagcagcggcugcgggaaauccacgaccgugcagcugauccagaggcuguacgacccggacgagggaaccaucaauauagacggccaggacaucaggaacuucaacgugaacuaccuccgggaaaucaucggcguggucucccaggagcccgugcuguucagcaccaccaucgccgagaauaucuguuacggcaggggcaacgugaccauggacgagaucaagaaggccgucaaggaagcaaacgccuacgaguucaucaugaagcucccccagaaauucgacacccuggugggagagagaggagcccaacugucuggcgggcagaagcagaggaucgccaucgcgagggcccuggugcggaaccccaagauccuccugcucgacgaggccaccuccgcccuggacaccgagagcgaggccgaggugcaggccgcacuggauaaggccagggagggcaggaccacuauagugauagcgcaucggcugagcaccguucgcaacgccgacgucaucgccggcuucgaagacggcgugaucgucgagcagggcucgcacuccgagcuuaugaagaaggagggcguguacuucaagcuggugaauaugcagaccagcgggucccagauccagagcgaggaguucgaacuaaacgacgagaaagccgccacccgcauggcccccaauggauggaaaucccgucuguuccggcacuccacccagaagaaccugaaaaacucccagaugugccagaagucccucgacguggagaccgacggccuggaagccaaugugccccccgugagcuuccugaagguccugaagcucaacaagaccgaauggcccuacuucguggugggcaccgugugcgccaucgccaacggcggccuccagcccgccuucagcgugaucuucagcgagaucaucgccaucuucgggcccggggacgacgccgugaagcagcagaaguguaauaucuuuagccugaucuuccuguuccugggcaucauuuccuuuuucaccuucuuucuucagggguuuaccuucggcaaggccggcgagauccugacgcggaggcugaggagcauggccuucaaggcgaugcugaggcaggacaugagcugguucgacgaccacaagaacuccaccggugcccugagcaccaggcuggccaccgaugccgcccaggugcagggcgccaccggcaccaggcucgcccucaucgcacagaacaucgccaaccugggcacgggaaucaucaucagcuucaucuauggauggcagcugacccugcugcugcuggccguggugcccaucauagccgugucgggaaucguggagaugaagcugcuggccgguaacgccaagcgggacaaaaaggagcuggaggccgccggcaaaaucgcgaccgaagccaucgaaaacauacggaccguagugucccugacccaggaacgcaaguucgagagcauguacguggagaagcucuacggucccuaccggaacagcgugcagaaggcgcacaucuaugguauaaccuuuagcaucagccaggccuucauguacuucuccuacgccggcugcuuccgguucggcgccuaucugaucgugaauggccacaugcgguuucgagacgugauccucguguucagcgccauaguguuuggcgccgucgcccuggggcacgcaucaagcuucgcccccgacuacgccaaagccaagcucagcgccgcccaccuguucaugcuguucgagaggcagccccugaucgacagcuacuccgaggagggccucaagcccgacaaauucgaggggaauaucaccuucaacgaaguaguguucaauuaccccaccagggccaacgugcccgugcugcagggccugagccuggaggugaaaaagggccagacccuggcccuggugggauccagcggcuguggcaaauccaccguggugcagcuucuggagagguucuacgacccccucgccggcaccguguucguggacuucggcuuccagcugcuggacggccaggaggccaagaagcugaacgugcaguggcugagggcccagcucgggaucgucagccaagagcccauccuguucgacugcagcaucgcggagaacauagcguacggcgauaacuccagggucgugagccaggacgagaucgucuccgccgccaaggcugccaacauccaccccuucaucgaaacccugccccacaaguacgagacccgcgugggggacaagggcacgcagcugagcggcggacagaagcagaggaucgccaucgccagggcccugaucaggcaaccccagauccugcugcuggaugaggccaccagcgcccuggacaccgagagcgagaagguggugcaggaggcccuggacaaggccagggaggggcgcacgugcaucgugaucgcccacaggcucucaaccauccagaacgccgaccugaucgugguuuuccagaacggccgggugaaggagcacggcacgcaccagcaacuccuggcccagaagggcaucuacuucagcauggucagcgugcaggccgguacccagaaccuu

SEQ ID NO: 93 - RNA, 3753 nt, Artificial Sequence
  Synthetic Polynucleotide
augagcaccgaacgggauagcgagaccaccuucgacgaggacucgcagcccaacgacgaggugguaccguacuccgacgacgagacugaagacgaacuggacgaccaggggagcgccguggagccggagcagaaucgggugaaccgggaggccgaggagaacagggagcccuuccgaaaggagugcaccuggcaggugaaagccaacgaucggaaguaccaugagcagccacacuucaugaacacaaaguuccuguguaucaaagaguccaaguacgccaauaaugcuaucaagaccuacaaguauaacgcguuuaccuucauccccaugaaccuuuucgagcaauuuaaaagagcugccaaucucuacuuucuggcccugcucauacuccaggccgugccccagaucuccacccuggccugguauaccacccuggugccccugcucgugguacugggcgugaccgccaucaaggaccucguggacgacguagcccgacacaagauggacaaggagaucaacaaccggacgugcgaggugaucaaggacggcagguucaaaguggccaaguggaaagagauccaggucggcgacgucauccgccugaagaagaacgacuucgugcccgccgacauccugcugcuauccuccagcgagcccaauagccucugcuauguggagaccgccgaacucgacggggaaaccaaccugaaguucaagaugagccuggagaucaccgaccaguaccugcagagagaggauacgcuggccaccuucgacggcuucaucgaaugcgaggagcccaacaacagacuggacaaguucaccgggacccuguucuggcggaacaccagcuucccgcuggacgcugacaagauccugcugcgcgguugugucaucaggaacaccgacuuuugccacggccuggugaucuucgcgggcgccgauaccaaaaucaugaaaaacucaggcaagacccgcuucaaaaggacuaagaucgacuaccugaugaacuacaugguguacaccaucuuuguggugcuaauccugcugagcgccggccucgcaaucggccacgccuacugggaagcacaggucgggaacagcagcugguaccuguacgacggagaggaugacacccccagcuaucgcggcuuccucaucuucuggggcuacaucauagugcugaacaccauggugccgaucagccuguacgucuccguggaggugauccgucugggccagucccauuuuaucaauugggaccugcaaauguauuaugccgagaaggauacccccgccaaggccaggaccaccacccuuaacgagcagcuuggccagauccacuacaucuucagcgacaagaccggcacgcugacccagaacauaaugaccuuuaagaagugcugcaucaacggccagaucuacggcgaccaccgugacgccucccagcacaaccacaacaagauugagcaggucgacuuuagcuggaacaccuacgccgacggcaagcuggccuucuacgaccacuaccugaucgagcagauccagucaggcaaggagcccgaggugcggcaguuuuucuuccugcucgccgugugucacaccgugaugguggacagaacggacgggcagcucaacuaccaggccgcgucgcccgacgaaggggcgcuggugaacgccgccaggaacuucggcuucgccuuccuggccaggacccaaaacaccaucaccauaagcgaacuuggcaccgagaggaccuacaacgugcuggccauccucgacuucaacuccgaccggaagaggaugagcaucauugugaggacccccgaagggaacaucaagcuguacugcaagggggccgacaccgucaucuacgagaggcugcaccggaugaaccccaccaagcaggaaacgcaggacgcgcucgacauauucgcaaacgagacccugaggacacuuugccugugcuacaaggagaucgaggaaaaggaguucaccgaguggaacaagaaguuuauggccgcauccguggccagcaccaaccgcgacgaagcccuggacaagguguacgaggagaucgaaaaggaucugauccuccugggagccaccgccaucgaggacaagcuccaggauggcgugccugagaccaucuccaaacuggccaaggccgauaucaagaucugggugcugaccggcgacaagaaggagaccgccgagaauaucggcuuugccugcgagcugcugaccgaggacacaaccaucugcuacggcgaggacaucaacagccugcugcacgccaggauggagaaccagcgcaaccgcggggggguguacgccaaguucgcgccccccgugcaggaaagcuucuucccccccggcgggaacagggcccugauuaucacgggcagcuggcugaacgagauacuccuggagaagaaaaccaaacggaacaaaauccugaagcucaaguuccccaggaccgaggaggagaggcggaugcggacccaguccaagcgucgccuggaggccaagaaggaacagcggcaaaagaauuucguggaccuggcgugcgaguguagcgccgucaucugcugccgggucaccccaaagcagaaggccauggugguggaccuggugaagagguacaagaaagccaucacccuggccaucggcgauggggccaacgacgucaacaugaucaagaccgcccacauuggcgucggcaucagcggccaagagggcaugcaggccgugaugagcagcgauuauagcuucgcccaguuccgcuacuuacaaaggcugcuccucgugcacggcagguggagcuacaucaggaugugcaaguuccuccgguacuucuuuuacaagaacuucgccuucacccuggugcacuuuugguacucauucuucaauggcuacagcgcccagacggccuacgaggacugguucaucacccuguacaacgugcucuauaccucccugccagugcuguugaugggccugcuggaucaggacgugagcgacaagcugucccugcguuuucccggacuguauaucguggggcagcgggaccugcuguucaacuacaaaagguuuuucgugucccugcuucacggcgugcucacuagcaugauccuguuuuucaucccccugggggccuaccugcagacggucgggcaggacggcgaggccccauccgacuaccaguccuuugccgugaccauagccagcgcccuugugauuacggucaacuuccagaucgggcucgauaccuccuacuggacguucgucaacgccuucagcaucuucggcagcaucgcccuguacuucgggaucauguucgacuuccacagcgcgggcauccacgugcuguucccauccgccuuccaguuuacgggcaccgccagcaaugcccugaggcagcccuacaucuggcugaccauaauccucgcaguggccgucugccuccuccccguaguggccaucagguuccugagcaugaccaucuggcccucggagagcgacaagauucagaagcacaggaagcggcugaaggccgaggagcaguggcagcgcaggcagcagguguucaggcggggcguuagcaccaggagauccgccuacgccuuuagccaucaacgaggcuaugccgaucugauaagcuccggacgcagcauuaggaagaaacgaagcccccuggacgccaucguggccgacggcaccgccgaauacaggcgaaccggcgacagc

SEQ ID NO: 94 - RNA, 3753 nt, Artificial Sequence
  Synthetic Polynucleotide
auguccaccgagcgagacagcgagaccaccuucgacgaggacucccagcccaacgacgagguggugcccuacagcgacgacgagaccgaggacgagcuggacgaccagggcuccgccguagagcccgaacagaacagggugaacagggaggccgaggagaaccgggagccguuucggaaagagugcaccuggcaggugaaggccaacgaucggaaguaccacgagcagccccacuucaugaacaccaaguuccugugcaucaaggagagcaaguacgccaacaacgcuauaaagaccuacaaauacaacgccuucaccuucauccccaugaaccuguucgaacaguucaagagggcagccaaccuguauuuccuggcccugcucauccuccaggccgugccgcagaucagcacacucgccugguacaccacccucgugccccugcucguggugcucggcgugaccgccauuaaggaucucguggaugauguggccaggcauaagauggacaaggagaucaacaacaggaccugcgaggucaucaaggacgggcgguuuaaggucgccaaguggaaggagauccaggucggugacgugauccggcugaaaaagaacgauuucgugccagccgacauccugcugcugagcagcagcgaacccaauagccucugcuacguggagaccgcggagcucgauggagagaccaaucugaaguucaagaugucacuggagauuaccgaccaguaccugcagagggaggacacccucgcgaccuucgauggcuucauagagugugaggagcccaacaacaggcuggacaaauucaccgggacccuguucuggcgaaacaccagcuucccccuggacgccgacaagauccugcugaggggcugcgugaucagaaacacagacuucugccaugggcuggucaucuucgccggcgcggacacgaaaaucaugaagaacuccggcaagaccagguuuaagcgaacgaagaucgacuaccugaugaacuacaugguguacacuaucuuugucguccugauccugcuuagcgccgggcuggcaaucggccacgcauauugggaggcccaggugggcaacuccagcugguaccuguacgacggcgaggacgacacccccagcuaccgcggcuuccugauauucuggggcuacaucaucgugcugaauaccauggugcccauuucccucuacgugagcguggaagugaucaggcugggacagagccacuucaucaauugggaccugcagauguacuaugccgaaaaggacacccccgccaaagcccggaccaccacccugaacgagcaacugggacaaauccacuacaucuuuagcgauaaaacgggaacccugacccagaacaucaugaccuucaaaaagugcugcauaaacggccagauuuacggagaucaccgcgacgccucccaacacaaccacaacaagauugagcagguggauuucuccuggaauaccuacgccgacgggaagcucgccuucuacgaccacuaccugaucgagcagauccagagcggcaaggagcccgaggugcggcaguucuucuuccugcuggccgugugccauaccgugaugguggacaggaccgauggccagcugaacuaccaggccgcaagccccgacgagggggcccuggugaacgccgcgcguaauuuuggcuucgccuuccucgcgaggacccagaacaccaucaccaucagugagcugggcaccgaaaggaccuacaacgugcuggccauccuggacuucaacucggaccgcaagaggauguccaucaucgucagaacccccgaggggaacaucaaacuguacugcaagggggccgacaccgugaucuaugagcgccugcaccggaugaaccccacuaaacaggagacccaggacgcccuggacaucuucgccaacgagacccugcggacccugugccugugcuauaaagagaucgaggagaaggaauucacggaguggaacaaaaaguucauggccgccagcguggccuccaccaacagggacgaggcccuggacaaaguguacgaggagaucgagaaggaccugauacuguuaggggccacggccauagaggacaaacugcaagauggcgugcccgagaccaucagcaagcuggcgaaggcagacaucaagaucuggguccugaccggcgacaagaaggagacggccgagaacaucggcuucgccugcgagcugcucaccgaggacaccaccaucuguuacggcgaggacaucaauagccugcuccaugccaggauggagaaccagcgcaacaggggcggcguguacgcgaaauucgccccccccgugcaggagagcuucuuccccccgggcgggaacagggcccugaucauaaccgguagcuggcugaacgagauccugcuggagaagaagaccaagcgcaauaagauccugaaacucaaguuccccaggaccgaggaggaaaggaggaugcggacccagaguaaaaggcgccuggaagccaagaaagagcagaggcagaaaaacuucguggaucuggccugcgagugcagcgccgugaucugcuguagggugacccccaagcagaaggccauggugguagaccuggugaagagguacaaaaaggccaucacccuggccaucggggacggcgcgaacgacgucaacaugaucaagaccgcccacaucggcgucgggaucagcgggcaagaaggcaugcaggccgugauguccagcgacuacagcuucgcccaauucagguauuuacagaggcugcuccuagugcacggucggugguccuacauaaggaugugcaaguuccugagguauuucuucuacaagaacuucgcauucacccuggugcacuuuugguacagcuucuucaacggcuacagcgcccagaccgccuacgaggacugguucaucacgcuguacaauguccuguauaccagccugcccgugcugcucaugggccugcucgaccaggacgugagcgauaagcucagccugagguuccccggccuguacaucgugggccagagggaucuccuguucaacuacaagcgguucuuugucagccuccugcacggcgugcugaccagcaugauccucuucuucaucccccugggcgccuaucugcagaccgugggccaggacggggaggccccgucagacuaucagagcuucgcagugaccaucgccagcgcccuggugaucaccgugaacuuccagaucggccuggacaccagcuacuggaccuuugugaacgccuuuagcaucuucgggagcaucgcccuguacuucgguaucauguucgauuuccacagcgccggcauacacgugcucuuucccuccgccuuccaguucaccggcaccgccagcaacgcgcugaggcagcccuacaucuggcugacaaucauccuggccgucgccgugugccugcugcccgugguggccauccgguuccugagcaugaccauuuggcccucggagagcgacaagauccaaaagcacaggaagcggcugaaagccgaggagcaauggcagcggcgacagcaggucuuccgcagggggguguccaccaggcggagcgccuacgccuuuucgcaccagcgcggcuacgccgaccucaucagcagcggacggucgauucgcaagaagaggagcccccuagaugccaucguggccgacgggaccgccgaguacaggcggaccggugacagc

SEQ ID NO: 95 - RNA, 3753 nt, Artificial Sequence
  Synthetic Polynucleotide
auguccaccgaaagggacagcgagaccaccuuugacgaagauagccaacccaacgacgaggugguacccuacuccgacgacgagaccgaggacgagcuggacgaccagggcuccgcgguugaacccgaacagaaccgggucaacagggaagccgaggaaaaucgcgagcccuucaggaaggagugcaccuggcaggugaaggccaacgacaggaaguaccacgagcagccccacuucaugaauaccaaguuccugugcaucaaggaaagcaaguacgccaacaacgccaucaagacguacaaguauaacgccuucaccuucauucccaugaaccuguucgagcaauucaagagggccgcgaaucuguacuuccucgcccugcugauccugcaagcggugccccagaucagcacacuggccugguacaccacccuggucccccuccugguggugcugggggucaccgccaucaaagaccucguggaugacgucgcgcggcauaagauggacaaagagaucaauaauaggaccugcgaggugaucaaggauggcagguuuaaggucgccaaauggaaggagauccaggugggcgacgugaucaggcugaaaaagaaugacuucguccccgccgauauccugcuccuguccagcagcgagcccaacagccugugcuacguggagacggccgaacucgacggcgagaccaaccugaaauucaagaugagccucgagaucaccgaccaguaccuccagcgggaagacacccuggccacguucgacggcuuuauagagugcgaggagcccaacaaccgccuggacaaguuuacuggcacacuguuuuggcggaacaccuccuucccgcuggaugccgacaagauccuccugaggggcugcgugaucaggaacaccgacuucugccacggccucgugaucuucgcgggcgccgacaccaagaucaugaagaacagcggaaagaccagguucaagaggaccaagaucgacuaccucaugaacuacauggucuacaccaucuucguugugcuuauccugcugucggccggccuggccaucggccacgccuacugggaggcccaggucgggaacagcagcugguaucucuacgacggcgaggacgacacccccagcuaucgcggcuuccugaucuuuuggggcuacaucaucguccugaacaccauggugcccaucucacuguacgugagcgucgaggugaucaggcuggggcagucccacuucaucaacugggaucugcagauguacuacgccgagaaggacacccccgcgaaggccaggacgaccacccugaaugagcagcugggucagauccacuacaucuucagcgacaagaccgggacgcugacccagaacaucaugaccuucaagaagugcugcauaaacggccagaucuacggcgaccaccgggacgccagccagcacaaccauaacaagaucgagcaggucgacuucuccuggaauaccuacgccgauggcaagcuggccuucuacgaccacuaccugaucgaacagauacagagcgggaaggaacccgaagugaggcaguucuucuuccugcuggccguaugccacacagugaugguggacaggaccgacggccagcucaacuaucaagcggccagccccgacgagggcgcucucguaaacgccgccaggaacuucggcuucgccuuccucgccaggacccagaacaccauuaccauauccgagcucggaaccgagcggaccuauaacguucuggccauccuggacuucaacagcgacaggaagcguaugagcaucaucgucaggaccccagaaggcaacaucaagcuguacugcaagggggccgauaccgugaucuacgagaggcugcaccggaugaaccccaccaagcaggaaacccaggacgcccuggacaucuucgccaacgaaacgcugcggacccugugccucugcuacaaagagaucgaggagaaggaguucaccgaguggaacaagaaguuuauggccgccagcguggccagcacaaaucgggacgaggcccuggacaaggucuacgaggagaucgagaaagacuugauccugcugggcgccacggcaaucgaggacaagcuacaggacggcguccccgagaccauaagcaagcuggccaaagccgacaucaagaucuggguccugaccggagacaagaaagagaccgccgaaaacaucggauucgccugcgagcuucucaccgaggacacgaccaucugcuacggcgaggacaucaacucccugcugcacgccaggauggagaaccagaggaacaggggcggcguguacgccaaguuugccccucccgugcaggagagcuucuuuccccccgggggcaacagggcccugaucaucaccgggagcuggcucaacgaaauccugcuggagaagaagaccaagaggaauaagauccugaagcucaaguucccgaggaccgaagaggagaggcgcaugcgaacgcaguccaagcggaggcuggaggccaagaaggagcagaggcagaaaaacuuuguggaccucgccugcgaaugcagcgccgugaucugcugucgcgucacgcccaagcaaaaggccaugguugucgaccuggugaagagguacaagaaggccauaacccuggcaaucggcgauggcgccaacgacgugaacaugaucaagacagcccacaucggcguggggaucagcggccaagagggcaugcaggccguuaugagcagcgacuacagcuucgcgcaguucagguaccugcagcgccugcugcuggugcacggaagguggagcuacaucaggaugugcaaguuucugcgcuauuuuuuuuacaagaacuucgcguuuacccuggugcauuuuugguacuccuuuuuuaacggcuacucagcccagacugccuaugaggacugguuuaucacccucuacaacgugcuauauacgagcuugcccgugcugcugaugggccugcuggaccaggacguaagcgacaagcugagccuccgcuuccccggccuguacaucgugggucagagggaccugcuguucaacuacaagagguuuuuugugagccugcugcaugggguguugaccuccaugauacuguucuucaucccccugggggccuaccugcagaccgugggccaagauggcgaggccccuucggacuaccagucguucgcgguuacgauugccuccgcucuggugaucaccgugaacuuccagaucggucuggacaccagcuacuggaccuucgugaaugccuucagcaucuucggguccaucgcccucuauuucggcaucauguucgacuuccacuccgcgggcauccacgugcucuuuccuuccgccuuccaguucaccggcaccgccuccaacgcgcugaggcagcccuacaucuggcugaccaucauccuggccgucgccguaugccugcugcccgugguggccauccgcuuccuguccaugaccaucuggcccagcgaguccgauaagauccagaagcacaggaagaggcugaaggcagaggaacaauggcaaaggaggcagcagguguuccggaggggggugagcacccggaggagcgccuacgcguucagccaucaaaggggcuacgccgaccugauuagcuccggccgcucgauccgcaagaagaggagcccccuggacgcgaucgucgccgacggcaccgccgaguauaggcguaccggcgacagc

SEQ ID NO: 96 - RNA, 3753 nt, Artificial Sequence
  Synthetic Polynucleotide
augucgacagagcgggauagcgaaaccaccuucgacgaggauucccagccgaacgacgaaguggugccguacagcgacgacgagaccgaggacgagcuggacgaccaaggcuccgccgucgagcccgagcagaacagggugaaccgcgaggccgaggagaaccgggagcccuuuaggaaggaauguacguggcaggugaaggccaaugaucggaaguaccaugaacagccgcacuuuaugaacacuaaguuccugugcaucaaggagagcaaguaugccaacaaugccaucaagaccuacaaguacaacgccuucacauuuauccccaugaaucuguucgagcaguuuaagcgagccgccaaccuguacuuccuggcccuccugauauugcaggccgugccccagaucagcacccucgccugguacaccacccuggugccccugcugguggugcugggcguuaccgccaucaaggaccugguggacgauguggcccgacacaagauggacaaggagaucaacaaccgcacgugcgaggugaucaaggauggccgcuucaagguggccaaguggaaggagauccaggugggcgaugugaucaggcugaaaaagaaugauuuugugccggccgauauccugcugcuguccuccagcgagcccaacucccugugcuauguggagaccgcggagcucgacggcgagaccaaccugaaguuuaagaugucccuggaaaucaccgaccaauaccugcaacgggaggacacccuggccaccuucgacggauucaucgagugcgaggagccgaacaauaggcuggauaaguucaccgggacccuguucuggcgaaacaccuccuucccccuggacgccgacaagauccugcugaggggaugcgugaucaggaacacagacuucugucacgggcucgugaucuucgccggggccgacaccaagaucaugaaaaacuccggcaagaccagguucaaaaggaccaagaucgacuaccugaugaacuacaugguuuacaccaucuuuguggugcugauccugcuauccgccggccuggccaucgggcaugccuacugggaagcucagguggggaacagcagcugguaccuguacgacggggaagacgacacccccagcuaccgcggcuuccugaucuucuggggcuacaucaucguacucaacacuauggugcccaucagccuguacgugagcguggaagugaucaggcugggccagagccacuuuaucaacugggaccugcagauguacuacgccgagaaagauacccccgccaaggccaggaccaccacccugaacgagcagcugggccaaauccacuacaucuucagcgacaagaccgggacccucacccagaacaucaugaccuucaagaagugcugcaucaauggccagaucuacggggaccaccgcgacgccagccagcacaaccacaacaagaucgagcagguggacuucagcuggaacacguacgccgacggcaagcuggccuuuuacgaccacuaucugaucgagcagauccagagcggcaaagaacccgaggugagacaguuuuucuuccugcuggccguuugccacaccgugauggucgauaggaccgacggccagcugaacuaccaggccgccucccccgacgagggggcccuggugaacgccgccaggaauuuuggcuuugcguuucuggccaggacccagaacaccaucaccaucagugagcuggggaccgagaggacauauaacgugcuggccauccucgacuuuaacagcgacaggaagaggaugagcaucaucgugaggacccccgagggaaauaucaaacucuacuguaagggagccgacaccgugaucuacgagcggcugcaucguaugaaccccaccaagcaggagacccaggacgcccuggacaucuucgccaacgagacccugcgcacccugugccugugcuacaaggagaucgaggagaaggaguucaccgaguggaacaagaaguucauggccgccucaguggcgagcaccaacagggacgaggcgcuggacaagguguacgaggagaucgaaaaggaccugauccugcugggcgcuaccgccauagaggacaagcugcaggauggcgugcccgagaccaucuccaaacuggccaaggcggacaucaagauuugggugcugaccggggauaagaaggagaccgcugagaacauaggcuucgccugcgaacugcugaccgaggacacgaccaucuguuacggggaggacauuaacagccugcugcaugccaggauggaaaaucagcggaauaggggcggcguguacgcaaaguucgccccccccgugcaggaguccuucuucccccccgggggcaacagggcgcugaucaucaccgggagcuggcucaacgagauccugcuggagaagaagaccaagaggaacaagauucucaagcucaaauuccccaggacggaggaagagcggcgcaugaggacccagagcaaaaggaggcucgaggccaagaaagagcagcgucagaagaacuuugucgaccuggccugcgaaugcagcgccguuaucugcugucgggugacccccaagcaaaaggccaugguggucgaccucgugaagagguacaagaaggcgaucacgcucgccaucggcgauggcgccaacgacgugaacaugaucaagaccgcccacaucggcgugggcaucagcggccaggaggggaugcaagccgugaugucguccgauuacucguucgcgcaguucagguaucuccagaggcugcugcugguccacgggcgcuggagcuauaucaggaugugcaaguuuuuacgguauuucuucuacaaaaacuuugccuucacccugguccacuucugguacagcuuuuucaacggcuacagcgcccagaccgccuacgaggauugguucaucacccuguacaacgugcuguacaccagccugccagugcugcugaugggucuccuggaccaggacguguccgacaagcugucccugcgguucccgggccuguacauugugggccaaagagaccuccuguucaacuauaagagguucuucgugucccugcugcacggcgugcugacuuccaugauccucuuuuuuaucccccugggggccuaccugcagaccguaggacaagacggggaggccccguccgauuaucaguccuucgccgugacgaucgccagcgcccuggugaucacggugaacuuccaaaucggccucgacaccucuuacuggaccuucgugaacgccuucuccaucuuugguagcaucgcccuguacuuuggcauuauguucgacuuccacuccgccggcauccaugugcuguuccccagcgccuuccaguucacgggcaccgccuccaacgcccucaggcagcccuacaucuggcugaccaucauccuggccguggcagugugccugcuccccgugguggcgauccgguuccugagcaugaccaucuggcccuccgaaagcgauaagauccagaaacacaggaagaggcugaaggccgaggagcaauggcagaggaggcagcagguguucaggagaggcgugagcaccaggcgaagcgccuacgccuucagccaccagaggggguacgccgaccugauaagcagcggccggagcaucaggaagaagagguccccccuggacgccaucguggcggacgggaccgccgaguaccggaggaccggggacagc

SEQ ID NO: 97 - RNA, 3753 nt, Artificial Sequence
  Synthetic Polynucleotide
augagcaccgagagggacuccgagaccaccuuugacgaggacagccaacccaacgacgagguggugcccuacagcgacgacgagaccgaggacgagcuggacgaccagggcagcgccguggagccggagcagaaccgggugaacagggaggccgaggagaauagggaacccuuccgaaaagaguguaccuggcaagugaaggccaacgaccgaaaauaccacgagcaaccccacuucaugaacaccaaguuccugugcaucaaggaguccaaguacgccaacaacgcaauaaaaaccuacaaauacaacgccuuuaccuucauccccaugaaccuguucgagcaguucaagcgcgccgcgaaucuuuacuuucuggcccuccugauccugcaggccgucccccagaucagcacacucgccugguacaccacgcuggugccccugcucguggugcucggagugaccgccaucaaggaucugguggacgacguugccagacacaagauggacaaggagauuaacaacaggacgugcgaggugaucaaggacgguagguucaagguggcaaaguggaaggaaauucaggugggcgacgugauucgccugaagaagaacgauuucgugccggccgacauacuccugcucagcagcuccgagccgaauagccugugcuacguggagacggccgagcucgacggagagaccaaccugaaguucaagaugucccuggaaaucaccgaucaguaucugcaaagggaggacacccuggccaccuucgauggcuucaucgagugcgaggagcccaacaaccgacuggacaaguucaccggcacccuguucuggcggaacaccagcuucccccucgacgcggacaagauccugcuccgggggugcgucauccggaacaccgacuucugccauggccuggugaucuucgccggggccgacaccaagaucaugaagaacagcgggaagacccgguucaagaggacgaagaucgacuaccucaugaacuacaugguguacaccaucuucguggugcugauccugcuguccgccggccuggccaucggccaugccuacugggaggcgcaggugggcaauagcucgugguaccucuacgacggcgaggacgauacccccaguuacaggggguuucugaucuucuggggcuacaucauugugcugaacaccaugguccccaucucccuguacgucagcguggaagugauccgccucggccagucacacuucaucaacugggaccugcagauguauuacgccgagaaagacaccccggcgaaggcccgcaccaccacccuuaacgagcaacugggucagauccacuacaucuuuagcgacaagaccggaacccucacccagaacaucaugaccuuuaagaagugcugcaucaacggccagaucuacggagaucaccgcgacgccucccagcacaaccacaacaaaaucgagcagguggacuucagcuggaauaccuacgccgacggcaagcucgccuucuacgaccauuaccugaucgagcagauccaguccggcaaggagcccgaggugcgacaauucuuuuuucugcuggccguuugccacaccgugauggucgauaggaccgacgggcagcucaauuaccaagccgccucccccgaugagggcgcccuagugaacgccgcccggaacuucggcuucgccuuccuggcacgcacccagaacacuaucaccauuuccgaacucggcaccgagcggaccuacaaugugcuggccauccuggacuucaacagcgacaggaagaggaugagcaucaucgugaggacccccgaggggaacauaaaacuguacugcaagggcgcagacaccgugaucuaugaacgccugcacaggaugaaccccaccaagcaggagacgcaggacgcccucgacaucuucgcgaacgagacccugcguacccucugccucugcuacaaagagaucgaagagaaggaguucaccgaguggaacaagaaguucauggccgcgagcguggccagcaccaacagggacgaggcccuggacaagguguacgaggaaauugagaaagaccugauccugcucggcgccaccgccaucgaggauaagcugcaagacggggugcccgaaacaauaagcaagcuggccaaagccgauaucaagauauggguccugacuggugacaagaaggagaccgccgaaaacaucggguuugccugcgagcugcucaccgaagacacaaccaucugcuacggcgaggauaucaacucgcugcugcacgcccgcauggagaaccagcgcaaccgugggggcguguaugccaaguucgccccccccgugcaagagagcuucuucccgcccggcgguaaccgggcccugauaaucaccggcagcuggcugaacgagauccugcuggagaaaaaaaccaagaggaacaagauccugaagcugaaguucccgcggaccgaagaggagaggcguaugcgcacccagagcaaaaggaggcuggaggccaagaaggaacagcgccagaaaaacuucguggaccuagccugcgagugcuccgccgugaucugcugccgcgucacccccaagcagaaggccauggugguggaccuggugaagagguacaagaaggccaucacucucgccaucggugacggggccaacgacgugaacaugaucaagaccgcccacaucggcgugggcaucagcggccaggagggcaugcaagccguuaugagcucugacuacagcuucgcccaguucagguaccuccaacggcugcugcuggugcacgggcgguggagcuacaucaggauguguaaguuccugagguacuucuucuacaagaauuucgccuucacccuggugcacuucugguacagcuucuucaauggcuacagcgcccagaccgccuacgaggauugguucaucacccucuacaacgugcuguacaccagccugccgguccugcugaugggccugcuagaccaggacgugagcgacaagcugagccugagguuucccgggcucuacaucgugggccagcgcgaccuccuguuuaacuauaagcgcuucuucgucagccugcuccacggcguccugaccagcaugauccuguucuucaucccccuaggggccuaccuccagaccgugggucaagacggggaggcccccagcgauuaccagagcuucgccgugaccauagcguccgcccuggugauaaccgugaacuuccagaucggccucgacaccucguacuggaccuucgucaacgccuucagcaucuucggcagcaucgcccucuacuucgggauaauguucgacuuccacuccgccggcauccacgugcuguuccccagugccuuccaauucaccgggaccgccagcaacgcccugcggcagcccuacaucuggcugaccauuauccuggccguggccgugugccugcugcccgucgucgccauccgguuccuuagcaugacgauauggcccagcgagagcgacaaaauccagaagcauagaaagcggcugaaagccgaggagcaguggcaaaggcggcagcaaguguuccggcgaggcgucagcacccggaggagcgccuacgccuucagccaccagagaggguacgccgaucugaucuccagcggccggagcauaaggaagaaaagguccccgcuggacgccaucguggcagacggcaccgccgaguacaggcggaccggggacucc

SEQ ID NO: 98 - RNA, 3753 nt, Artificial Sequence
  Synthetic Polynucleotide
auguccaccgagcgggacuccgagaccaccuucgacgaggacagccagcccaacgacgaggugguccccuauagcgacgacgagaccgaggacgagcuggacgaccagggauccgccguggagcccgagcagaaccgugugaaccgggaggccgaggagaaccgugaacccuuccgcaaagagugcaccuggcaggugaaggccaacgacaggaaguaucacgaacagccccauuucaugaacacaaaguuccucuguaucaaggagagcaaguacgccaacaacgccaucaaaaccuauaaguacaacgccuucacauucauccccaugaaccuguuugaacaguucaagagggccgccaaccuguacuuccuggcacugcugauccugcaggccgucccccagaucagcacacucgccugguacaccacccuggugccccugcugguggugcugggcgucacagccaucaaggaccugguggacgauguagccaggcacaagauggacaaggaaaucaacaauaggaccugcgaggugaucaaggacgggagguucaaaguggccaaguggaaggagauccaggugggggaugugauccgccugaagaagaacgacuucgugcccgccgacauccugcugcugucgucgagcgagcccaacucccugugcuacguggaaaccgccgagcuggacggcgagaccaaccucaaguucaagaugagccuggagaucaccgaucaguaccugcagagggaggacacccuggccaccuucgacggcuucaucgagugcgaagagccaaacaaccggcuggacaaguucaccggcacccuguucuggaggaacacgagcuucccccuggaugccgacaagauccugcugaggggaugcgugauccgcaauaccgacuucugccacgggcuggugaucuuugccggcgcggacaccaagauaaugaagaauagcggcaagaccagauucaagaggaccaaaaucgauuaccucaugaauuacaugguguauaccaucuucguggugcugauccugcugagugccggccuggcgaucggccacgccuauugggaggcccagguugguaacagcuccugguaccucuacgacggugaggacgacaccccguccuacaggggguuccugaucuuuuggggguacaucaucgugcugaacaccauggugccaauaagccuguacgucucgguggaggugaucaggcuggggcaaagccacuucaucaauugggaccugcaaauguacuaugccgagaaagacaccccggccaaggccaggaccaccacccugaacgagcagcuggggcagauccacuacaucuuuuccgacaagacggggacgcugacccagaauaucaugacguucaagaaaugcugcaucaacggccagaucuacggggaccacagggacgccagccagcacaaccauaacaagaucgagcaaguggauuucagcuggaauaccuacgccgaugggaagcuggccuucuacgaccacuaccugaucgagcagauccaaucgggcaaggagcccgaggugcggcaauucuuuuuccugcuagccgugugccacaccgugaugguggacaggaccgacggccaacugaacuaccaagccgcaucccccgacgagggagcccuggugaacgccgcccggaacuucggcuucgcguuucuggcgcggacccagaacaccaucacgaucagcgaacugggcaccgagaggaccuacaacgugcuggccauccuggacuucaacagcgaccgaaagaggaugagcaucaucgugaggacccccgagggcaacaucaagcuguacugcaagggggccgauaccgucaucuacgagagacugcaccgaaugaaucccaccaagcaggaaacccaagacgcccuggacaucuucgccaacgaaacccugaggacgcugugccugugcuacaaggagaucgaggagaaggaguucaccgaguggaacaaaaaguucauggccgcuuccguggccagcaccaaccgcgacgaggcccuggacaaaguguacgaggagaucgagaaggaccugauccuccugggcgccaccgccaucgaggauaagcuccaggacggcguucccgagaccauuuccaagcuggccaaggccgacauaaagaucugggugcuuacgggcgacaagaaggagacggccgagaauaucggcuucgccugcgagcuccugaccgaggacaccaccaucugcuacggcgaggacaucaauagccugcugcaugcgaggauggagaaccagaggaaucgaggcgggguguacgcuaaguuugccccccccguccaggaaagcuuuuucccucccggcgggaacagggcccucauaauaaccggcuccuggcugaacgagauccuccucgagaagaagaccaagcgcaacaaaauccugaagcugaaguucccccggaccgaggaggaacgccggaugaggacucagagcaagcgaagacuggaggccaagaaggagcagaggcagaagaacuuuguggaccuggccugugagugcucugccgugaucuguugccgggucacccccaagcagaaagccaugguggucgaccuggugaagcgguacaagaaagcuaucacccuggccaucggggacggcgccaacgacgugaauaugaucaagaccgcgcacaucggcgugggcaucagcggccaagagggcaugcaggccgucaugagcagcgacuacucguucgcccaguuccgcuaccugcagcggcuacuccuggugcacggcaggugguccuauaucagaaugugcaaguuucugagguacuucuuuuacaagaacuucgccuucacccuggugcacuucugguacucguucuucaacggcuacagcgcccagacggccuacgaagacugguuuaucacccucuacaacguucuguacaccagccugccggugcuccuuaugggccugcuggaccaagacgugucggacaagcugagccugagauucccgggucuguacaucgugggucaaagggaccugcucuuuaacuacaagagguucuuugugagccugcugcacggaguccugaccagcaugauccuguucuuuaucccccucggcgccuaucuccaaacaguaggccaggauggagaggcccccagugacuaccagagcuucgccgugaccaucgcgagcgcccuggugaucaccgucaacuuccagaucggccucgacaccuccuacuggaccuucgugaacgccuucagcaucuucgggagcaucgcccuguacuucggcaucauguucgacuuccacuccgcggggauccacgugcuguuccccagcgcguuccaguucaccggaaccgccagcaacgcgcugaggcagcccuacaucuggcugaccaucauccuggcaguggccgugugccugcucccugugguggccaucagguuccugucgaugacaauauggcccagugaguccgacaagauccagaagcacaggaagcgucugaaggccgaggaacaguggcagaggaggcagcaggucuuccggagaggcguguccacccggaggagcgccuaugcguucucccaccagcgaggcuacgccgacuugaucuccagcgggagguccauccgcaagaaacggagcccacuggacgccaucguggccgauggcaccgccgaguacaggcgcaccggcgacucc

SEQ ID NO: 99 - RNA, 3753 nt, Artificial Sequence
  Synthetic Polynucleotide
augagcaccgagagggacagcgaaaccaccuuugacgaggacucccagcccaacgacgaggucgugccguacagcgacgacgagaccgaagacgagcuggacgaccagggcuccgccgucgagcccgagcagaacagggucaaccgggaagccgaggagaaccgggagcccuuucggaaggagugcaccuggcaggucaaggccaacgaucgcaaguaccacgaacagccucacuucaugaacaccaaauuccuguguaucaaagagucaaaguacgcgaacaacgccaucaagaccuacaaguacaacgcguucaccuucauucccaugaaccuguucgagcaguuuaagagggccgccaaccuuuacuuccuggcccugcugauccugcaggccgugccccagaucagcacccuggccugguacaccacccucgugccccugcuggucgugcugggcgucaccgccauuaaggaucugguggacgacguggccaggcacaagauggacaaagaaauuaacaacaggaccugugaggucaucaaggacggcagguucaagguggccaaguggaaggagauccaagugggcgacguaauccggcugaagaagaacgauuucguccccgccgacauccugcuccugagcagcucggagcccaacucccugugcuacgucgagaccgccgagcuggacggcgagaccaaccugaaguucaagaugagccuggagaucaccgaccaguaccuccagagggaggacacgcuggccaccuucgacggauucauagagugcgaggagcccaacaacaggcuggacaaguucaccggcacccucuucuggaggaacaccagcuucccccucgacgccgacaagauccugcugagaggcugugugauccggaauaccgacuucugucacggccucguaaucuucgccggcgccgacaccaagaucaugaagaacagcgggaagaccagguucaagcggacaaagaucgacuaccugaugaacuacauggucuacaccauauucguggugcugauacugcuguccgccggccuggccaucggccaugccuauugggaggcacaggugggcaacagcuccugguaccuguacgauggugaggaugauacccccagcuauaggggcuuccugaucuuuuggggguacauaaucgugcugaacaccauggugcccaucucccuguacguuuccguggaggucauucgccugggccagagccacuucaucaacugggaccugcagauguacuacgccgagaaggauacccccgccaaggcacggaccaccacccugaacgagcagcugggccagauacacuauaucuuuucggacaaaaccggcacccugacccagaacaucaugaccuucaagaaaugcugcaucaauggacagaucuauggcgaccaccgcgacgccucgcagcauaaucacaacaagaucgagcagguggacuucagcuggaacaccuacgccgauggcaagcuggcguucuacgaucacuaccugaucgagcagauccagagcgggaaggagccagaggugcgccaguucuuuuuucugcuggccgucugccacaccgucaugguggacaggaccgacggccagcugaacuaucaggccgccagccccgacgagggggcccucgugaaugccgcccggaauuucggguucgccuuccuggccaggacccagaacaccaucaccaucagcgaacuggggaccgagcguaccuacaaugugcuggccauccuggacuucaacuccgauaggaaaaggaugagcaucaucgucaggacccccgaggggaacaucaagcuguauugcaagggcgccgacaccgugaucuacgaacggcugcacaggaugaaccccaccaagcaggagacccaagacgcccuggacauauucgccaacgagacccucaggacccugugucugugcuauaaggagauugaggagaaggaguucaccgaguggaacaagaaguucauggccgcgagcguggccagcacgaacagagacgaggcgcuggacaaagucuaugaggagaucgagaaggaccucauucugcugggcgccacagccauagaggacaagcugcaggacggcguccccgagaccaucagcaagcuugccaaagccgauaucaagaucugggugcugaccggcgauaagaaggaaacugcggagaacaucggguucgccugcgagcugcugaccgaggauaccaccaucugcuacggcgaggauaucaacucccugcugcacgcucgcauggagaaccaacggaacaggggcgguguguacgccaaguucgccccccccguccaggaguccuucuucccgcccggcggcaauagggcucugaucaucacgggauccuggcugaacgagauccugcuggaaaagaaaaccaagcggaauaagauccucaagcucaaguuccccaggaccgaggaggaacggaggaugaggacccaguccaaacggaggcuggaggccaaaaaagagcaacggcaaaagaacuucguggaccuggccugcgaaugcuccgccgucaucuguuguagggugacccccaagcaaaaagccauggucguggaucucguuaagcgcuauaaaaaagccaucacccuggccaucggcgacggcgccaacgacgugaacaugaucaagaccgcccacauuggggucgggaucuccggucaggagggcaugcaggccgugaugucauccgacuacucguucgcccaguuuagguaccugcagcggcugcuccuggugcacggccgcugguccuacauuaggaugugcaaguuucugagguacuuuuuuuacaaaaacuucgccuuuacccuggugcacuucugguacucauucuucaacggcuacuccgcccagaccgccuacgaagacugguuuaucacccuguacaacgugcuguacaccucccugccggugcugcugauggggcugcuggaucaggacgugagcgacaaacugagccugcgguuccccggccucuacaucgucggccagagggaccugcuguucaacuauaagagguucuucgugagccugcugcacggcgugcugaccagcaugauccucuuuuucaucccccugggcgcauaccugcagaccguggggcaggauggcgaggcccccuccgacuaccagagcuucgccgucaccaucgccucagcacucgugaucacagugaacuuucagaucggccuggacacguccuacuggacguucgugaaugccuucuccaucuucggguccauugcccuguacuucgguaucauguucgauuuccauagcgcgggcauccacgugcuguuccccagcgccuuccaguucaccggcaccgccagcaacgcccugaggcagcccuacaucuggcugaccaucauccuggcgguagccgugugccugcugcccgucguggccaucagguuucucagcaugaccaucuggcccuccgagagcgacaagauccagaaacacaggaagaggcugaaggccgaggaacaguggcaaaggaggcagcaaguguucaggcgcggggugucgaccaggcgcagcgccuacgccuuuucccaccagcgaggcuaugccgaucugaucagcagcggccgcagcaucaggaagaagcggagcccccuggaugccaucgucgcggacgggacagcggaguauaggaggacgggcgacucg

SEQ ID NO: 100 - RNA, 3753 nt, Artificial Sequence
  Synthetic Polynucleotide
augaguaccgagcgggacuccgagaccacguucgacgaggacucccagcccaacgacgagguaguccccuauagcgacgacgaaaccgaggacgagcuggacgaccagggcagcgccguugagccagagcagaaucgggugaacagggaggcugaggagaacagggagcccuucaggaaggagugcacguggcaggucaaggccaacgacaggaaguaccacgagcagccgcacuucaugaacaccaaguuccuguguaucaaggagagcaaguacgccaacaacgcgaucaagacguauaaguacaacgcguucacauucaucccuaugaaccucuucgagcaguuuaaaagggccgccaaccuguacuuccucgcccuccugauccuccaggcagugccccagauauccacccucgccugguacaccacccuggugccccugcuggucguccugggcgucaccgcgaucaaagaccuggucgacgacguggccaggcacaaaauggacaaggagaucaacaaccgcacaugcgaggucauuaaggacggcagguucaagguggccaaguggaaggaaauccaagucggugaugugaucaggcugaagaagaacgauuucgugcccgccgacauccugcugcucagcaguagcgagccgaacagccugugcuacguggaaaccgccgagcucgacggcgagacgaaccugaaauucaagaugagccucgaaaucaccgaccaguaccuucagcgcgaagacacccuggccaccuucgacggguucaucgagugcgaagagccaaacaacaggcucgacaaguucaccggcacccucuucuggaggaauaccuccuuuccccuggacgcagacaaaauccugcugcgcggcugugugaucagaaacacggacuucugccacggccuggugaucuucgccggggccgacaccaagaucaugaagaauuccggcaagaccagguuuaagaggaccaaaaucgauuaccucaugaauuacaugguguacaccaucuuuguggugcugauccugcugagcgccggccuggcuaucggccacgccuacugggaggcccaggucggaaacuccagcugguaccucuacgacggcgaagacgauacccccagcuacaggggcuuccucaucuucuggggguacaucaucgugcugaacaccauggugccgaucucgcucuacgugagcgucgaggucauccggcuggggcagucccacuucaucaacugggaccugcagauguacuacgcugaaaaggauacccccgccaaagccaggaccacgacucugaaugagcagcucggccagauccacuauaucuucagcgacaagaccggcacccugacccagaacaucaugacguucaaaaaguguugcauaaauggccagaucuauggcgaccacagggacgccagccagcacaaccacaacaagaucgagcagguggacuucagcuggaacaccuaugccgacggcaagcuggccuucuacgaccacuaccugaucgagcaaauccagagcggcaaggaacccgaagugaggcaauucuucuuccugcucgccgugugccacaccgugauggucgaccggaccgacgggcagcugaacuaccaggccgccagccccgaugaaggggcccuggucaaugccgcccgcaauuucggcuucgcguuccuggccaggacccagaacaccaucacgaucuccgagcuggggaccgagaggaccuacaacgugcuggccauccuggacuucaacagcgacaggaaacggaugagcaucauuguccggacccccgagggcaauaucaaacuguacugcaagggcgcggacaccgucaucuacgagcgucugcaccgcaugaaccccaccaagcaggaaacgcaagacgcccuggauauauucgccaacgagaccuugaggacccugugccucugcuacaaggagaucgaggagaaggaguucaccgaguggaacaagaaguucauggccgccagcguagcaagcaccaauagggacgaggcccuggacaaggucuacgaggagaucgagaaggaucugauccuccugggcgcgacggccaucgaggacaaacugcaggacggagugcccgagaccaucuccaagcucgccaaggccgauaucaaaaucugggugcugaccggagacaagaaagagaccgccgagaacaucggguucgcgugcgagcugcugaccgaggacacaacgaucugcuacggcgaggacaucaacagccugcugcacgcgcgcauggagaaucagaggaaccgugggggcguguacgccaaguucgccccgccggugcaagaguccuucuucccgcccggcggcaacagggcccugauuaucaccggcagcuggcugaacgagauccugcuggagaagaagaccaaacggaacaagauccugaagcugaaguucccccggaccgaggaggagaggaggaugaggacgcaaagcaagcgccgccucgaagccaagaaggagcaaaggcagaagaacuucguggaccuggcgugcgagugcagcgccgugaucugcuguagggucacccccaagcagaaggccauggugguggaccuggugaagcgguacaagaaggccaucacgcuggccaucggggacggcgccaacgacgugaacaugaucaagacggcccauaucggcgugggcaucagcggccaggagggaaugcaggccgucaugagcuccgauuacuccuucgcccaguucagguaccuucagaggcugcuccuggugcacggccgguggagcuacauccgcaugugcaaguuccucagguacuucuucuacaagaacuucgccuuuacccuggugcacuuuugguacagcuucuucaacggcuacagcgcccagacggcguacgaggacugguuuaucacacuguauaacgugcuguacaccagccugcccgugcugcugaugggucugcuggaccaagaugugagcgacaagcugagcuugcgauuccccggccuguacauuguagggcagagggaccuccuguucaacuacaagagguuuuucguaagccugcugcacggcgugcugaccagcaugauccucuucuucauaccccugggagccuaccugcaaaccgucggccaggauggcgaagcgcccagcgacuaccagagcuucgcggugaccaucgccagcgcccuggugaucaccgucaacuuccaaauaggccuagacaccuccuacuggaccuucgugaacgccuucuccaucuucgguagcaucgcccuguacuucggcaucauguucgacuuccacuccgcgggcauccaugugcucuuccccagcgccuuccaguucaccgggaccgccucuaacgcccugaggcagccauacaucuggcugaccauaauccuggccguggccgucugccugcugcccguggucgccaucagguuccugucgaugaccaucuggcccagcgaguccgauaagauccagaagcacaggaaacgccuuaaagccgaggagcaguggcagcgcaggcagcagguuuuccggcgaggagugagcaccaggaggagcgcguacgccuucucacaccagcggggauaugcggaccugaucagcuccggccgcagcauccggaagaagaggagcccgcuggacgcgaucguggcggacggcacagccgaguaccguaggacaggcgacagc

SEQ ID NO: 101 - RNA, 3753 nt, Artificial Sequence
  Synthetic Polynucleotide
auguccaccgagcgggauagcgagacuaccuucgacgaggauucgcagcccaacgacgagguggugcccuacagcgacgacgagaccgaggacgagcuggacgaccagggguccgccgucgagcccgagcagaacagggugaacagggaagccgaagagaauagggagcccuucaggaaggagugcaccuggcaggugaaggccaacgacaggaaauaccacgagcagccccacuucaugaacaccaaguuccugugcaucaaagagagcaaguacgccaauaacgccaucaaaaccuacaaguacaacgccuucaccuuuauacccaugaaccuguuugagcaguucaagcgggccgcgaaccuguacuuccuggcccugcugauccuccaggccgucccccagauuagcacgcuggccugguauacgacccucgugccccugcugguggugcugggcgugaccgcgaucaaggaucucguggacgacguggccaggcacaagauggacaaggagaucaacaacaggaccugcgaggucaucaaagacgggagguucaaggucgccaaguggaaagaaauccagguaggcgacgugaucaggcugaagaagaacgacuuuguccccgccgacauacugcugcugucgagcagcgagcccaacagccugugcuacguggaaaccgccgagcuggauggggagaccaaccucaaguucaaaaugucccuggagaucaccgaccaguaccuccagagggaggacacccuggccaccuucgauggauuuaucgagugcgaggagccuaacaaccggcuggacaaguucaccggcacccuguucuggcgcaacaccuccuucccccuggacgcugacaagauccugcugcgggguugcgugaucaggaacacagacuucugccauggccuggugaucuuugccggcgccgacaccaagaucaugaagaacagcggcaagacccgguuuaagcggaccaagauagacuaccugaugaauuacaugguguacaccaucuuugucgugcugauacugcugagcgccgggcuggccaucggccacgcguacugggaggcccagguggguaauagcuccugguaccuguacgacggggaggacgacacccccaguuacaggggcuuccugaucuucuggggcuacaucauugugcugaacaccauggugcccauaucccuguacgugagcguggaggugaucaggcugggacagagccacuucaucaacugggaccugcagauguacuacgccgaaaaggacacgcccgccaaggcucggacgaccacgcugaacgaacagcugggccagauacacuacaucuucagcgacaagacgggcacccucacccagaacaucaugaccuucaagaagugcuguaucaacggccagauuuacggggaucacagggacgccucucagcacaaccacaacaagauagaacagguggauuuuagcuggaauacauacgccgacgggaagcuggccuucuacgaccacuaucugaucgagcagauccaaucgggcaaggaacccgagguuaggcaguucuucuuccuccuggccgucugccauacagugauggucgacaggaccgacggccagcugaacuaccaggccgccagccccgacgagggcgcccuggugaacgccgcccgcaacuuuggcuucgccuuucuggccaggacacagaacaccauaaccaucagcgaacucgggaccgagcggaccuacaacgugcuggccauccuggacuucaacagcgaucgaaagcggaugagcaucaucgugcggacccccgagggcaacaucaagcuguacuguaagggcgccgacaccgugaucuaugagcgucuccacaggaugaaucccaccaaacaggagacccaggacgcccuggacaucuucgccaacgaaacccucaggacccugugucugugcuacaaagagaucgaagaaaaagaauucaccgaauggaacaagaaguuuauggccgccagcguugccucaaccaacagggacgaggcccucgacaaaguguacgaggagaucgagaaggaccugauccugcugggcgccaccgccaucgaggauaagcuccaagauggggugccagagaccaucagcaagcucgccaaagccgacaucaagaucugggugcuaaccggagacaagaaggagaccgccgagaacaucggcuuugccugcgagcuccugacggaggauaccaccaucugcuacggggaggacaucaacagccugcugcacgcccgcauggagaaccagcgcaacaggggcggcguauaugccaaguucgccccgccugugcaggagagcuuuuucccccccggagggaaccgugcccucaucaucaccggguccuggcugaacgagauccugcuggagaagaagaccaagcggaacaagauccugaagcugaaguucccccgcaccgaagaagaacgccgcaugcggacucagagcaagaggaggcuggaggccaagaaagaacagcgccagaagaacuucguggaccuggccugcgaauguuccgccgugaucuguugcagggucacacccaagcagaaggccaugguggucgaccugguuaaacgguacaagaaggccaucacgcuggccaucggcgauggcgccaacgacguaaacaugauaaagaccgcccauaucggcgugggcaucuccggccaggaggggaugcaggccgugauguccuccgacuacagcuucgcccaguuuagguaccugcagagguuacugcuggugcacggcagguggagcuacaucaggauguguaaauuccugagguacuucuucuacaagaacuuugccuucacccuggugcacuucugguacuccuucuucaacggauacucagcccagaccgccuacgaggauugguucauaacccuguacaacgugcucuacaccagccugccggugcuccugaugggccuccuggaccaggacgucuccgacaaacugucccugagguuccccggccucuacaucgucgggcagcgggaccugcuguucaauuacaagagguucuucgugagccugcugcacgggguccugaccucgaugauccuguucuucaucccccucggugccuaccugcaaaccguaggccaggacggggaggcccccagcgauuaccagucguucgccgucaccaucgcgagcgcccuggugaucaccgucaacuuccagaucggucuggacaccagcuauuggaccuucgugaaugccuucagcaucuucgggagcaucgcccuguacuuuggcaucauguucgacuuccacagcgccggcauccaugugcucuuucccagcgcguuccaguucaccggcaccgccucaaacgcccugaggcagcccuauauuuggcugacuaucauccuggcgguggccgugugccuccugcccgugguggccauccgguuccugagcaugacgaucuggcccuccgagagcgacaagauucagaagcacaggaaacgccugaaggcggaagagcaauggcagaggcggcagcaaguguuccgcaggggcguguccaccagacggagcgccuacgccuucagccaccagcguggguacgccgaccugaucagcagcggccgaagcauccgcaagaagagguccccccuggacgccaucguggcggacgggaccgccgaguaccgccggaccggggacucc

SEQ ID NO: 102 - RNA, 3753 nt, Artificial Sequence
  Synthetic Polynucleotide
augagcaccgagcgcgacucggagaccacguucgacgaggacagccagcccaacgacgaggucgugcccuacuccgacgacgagaccgaggacgagcuugacgaucagggcagcgccguggaacccgagcagaaccgggugaacagggaggccgaagagaaccgugagcccuucaggaaggaaugcaccuggcaggugaaagccaacgacaggaaauaccacgagcagccgcacuucaugaacaccaaguuccugugcaucaaggagagcaaauacgccaacaacgccaucaagacguacaaguacaacgccuucaccuucauccccaugaaccuguucgagcaguuuaaacgagcggccaaccuguacuuccuagcccuccucauccugcaagccgugccccagaucuccacccuggccugguauaccacccuggugccccugcugguggugcugggcgucacggcuaucaaggaccucguggacgauguggcgcggcacaagauggauaaggagaucaauaacaggacgugcgaagucaucaaagacggcagguuuaagguugccaaguggaaggagauccaggugggcgacgugaucaggcugaagaaaaacgacuucgugccugcggacauccugcugcugagcagcuccgagcccaacagccugugcuacguggagaccgccgaacuggauggcgagacgaaccugaaguucaagaugagccuggagaucaccgaccaauaccugcaaagggaggacacgcuggccaccuucgacggauucaucgagugcgaggagcccaacaaccgccuggacaaguucaccggcacccuguucuggaggaacaccuccuucccccucgacgcggacaagauacugcucaggggcugcgugauccggaauacggacuucugccacggccugguaaucuucgcuggggccgacaccaaaaucaugaagaacagcggcaagacacgcuuuaagcggaccaagaucgacuaccugaugaacuacaugguauacaccauauuuguggugcucauccugcugagcgcagggcuggccaucgggcaugccuacugggaggcccaggugggcaacucaagcugguaccuguaugacggcgaggaugacacccccagcuaccgaggcuuucugaucuucuggggguacaucaucguacucaacaccauggugcccauaagccuguacgugagcguggagguaauccggcugggccagucccacuucauuaacugggaccugcagauguacuacgcggagaaagacacccccgccaaggcgcgaaccaccacccugaacgagcagcugggucagauccacuacauauucuccgacaaaaccggcacccucacccagaacaucaugaccuucaagaagugcugcaucaacggccagaucuauggcgaccaccgggacgccucccagcacaaccauaacaagaucgagcaggucgauuucaguuggaacaccuacgccgacggaaagcuggccuucuacgaucacuaucucaucgagcagauccaguccggcaaggagccggagguccggcaauuuuucuuccuccuggccgugugccacaccgugaugguggaucguaccgacggacaacugaacuaccaggcagccagcccagaugaaggcgcacuggucaacgccgccaggaauuucggcuucgccuuccuggccaggacccagaacaccaucaccaucagcgagcuggggaccgaaaggaccuacaacguacuggccauccuggacuucaacuccgacagaaagcguauguccaucaucgucaggaccccggagggcaauaucaaacuguacugcaagggcgccgacacggugaucuaugaacgacugcaucggaugaacccgaccaagcaggaaacccaggaugcacuggauaucuucgccaacgagacccugaggacccucugccugugcuacaaggaaauugaggagaaggaguucaccgaguggaacaagaaguucauggccgccuccguggccagcacgaauagggaugaggcacucgacaagguguacgaggagauagaaaaagaccugauccugcugggagccaccgcgaucgaagacaagcugcaggacggcgugcccgagaccaucagcaaacuggccaaggccgacaucaaaaucuggguccugaccggcgauaagaaggagaccgcggagaacaucggcuucgccugugagcugcugaccgaggacacaacgaucugcuacggugaggacaucaacagccugcuccacgccaggauggagaaccagaggaaccgcgguggggucuacgccaaguuugccccccccgugcaagagagcuuuuucccccccggcggcaacagggcccugauuaucacggggagcuggcucaacgagauccugcuggagaagaagacaaagcggaacaagauccugaagcucaaguuccccaggaccgaggaggagaggaggaugcggacccaguccaagaggaggcuggaggccaagaaggagcaaaggcaaaagaacuucguggaccuggccugcgagugcuccgcagugauaugcugcagggugacgcccaagcaaaaggccauggugguggaccuggugaagagguauaagaaagccauuacccuggccaucggcgacggggccaacgaugugaacaugaucaagaccgcccacaucggcgugggcaucagcgggcaggaggggaugcaggccgugaugagcagcgauuacagcuucgcccaauucagguaucugcaacggcugcugcuaguccacgggcgguggagcuauauuaggaugugcaaguuucuccgguacuucuucuacaagaacuucgccuucacccuggugcauuucugguacagcuuuuucaacggcuacagcgcgcagaccgccuaugaagacugguucaucacccuguacaauguacuguacacgucacuccccgugcugcucauggggcugcuggaccaggacguuuccgacaagcugagccugagguuccccggccuguacaucguuggacagcgugaccugcucuucaacuacaagcgguucuucgugagucugcugcacggcgugcugacgagcaugauccucuucuucaucccccucggcgccuaccugcagaccgucggccaggacggcgaggcccccuccgacuaccagagcuucgcggugaccaucgccagcgcccuggugauaaccgugaauuuccaaaucgggcuggauaccucauacuggaccuucgucaacgccuucagcaucuucggaagcaucgcccuguacuucggaaucauguuugacuuccacucagcgggcauccacguccuguuccccagcgccuuucaguuuacaggcaccgccagcaacgcccugcgucagcccuacaucuggcugaccauuauccucgccguggccgugugucugcugcccguggucgccaucagguuccugagcaugaccaucuggcccagcgaguccgacaagauccagaagcacaggaagaggcucaaggccgaggagcaguggcagaggaggcaacaaguguuccggcgaggcgugagcacucggaggagcgccuacgcauucagccaccagagaggcuacgccgaucugauuuccucaggccgcuccaucaggaagaagaggagcccccuggacgccaucguggccgacggcaccgccgaauacaggcgcaccggcgacagc

SEQ ID NO: 103 - RNA, 3753 nt, Artificial Sequence
  Synthetic Polynucleotide
auguccaccgagagggauagcgagaccacguucgacgaggacagccaacccaacgacgagguggugcccuacuccgacgacgagaccgaggacgagcuggacgaccagggguccgccguggaacccgagcagaaccgugugaaccgagaggccgaggagaacagggagcccuucaggaaggagugcaccuggcaggugaaggccaacgaccggaaauaccacgagcagccccacuucaugaacaccaaauuccugugcaucaaggagagcaaguaugccaacaacgcgaucaagaccuauaaguacaaugccuucacuuuuauccccaugaaccuguuugagcaauuuaagcgcgcggccaaucucuacuuccucgcccuccugauccugcaggccgugccccagaucagcacccuggccugguacacaacccuggucccccugcugguggugcucggcgugaccgccaucaaggaccucguggacgacguggcccggcacaagauggacaaggagaucaacaaccguacgugcgaggugaucaaagacggcagguucaagguggccaaauggaaggagauucaggucggcgacgucaucaggcugaaaaagaacgacuucgugcccgccgauauccuccugcucagcagcuccgagcccaacucccugugcuacguggagaccgccgagcuggacggggagaccaaucugaaguucaagaugagccuggagauaaccgaccaguaccugcagagggaggauacgcuggccacguucgauggcuucaucgagugcgaagaacccaauaacaggcuggacaaguucaccgggacgcuguucuggaggaauaccagcuuuccacuggaugccgacaagauccugcucaggggcugcguaaucaggaacaccgacuucugucauggucuggugaucuucgccggggccgacaccaagauaaugaagaacucgggaaagaccagguucaagagaaccaaaaucgacuaucugaugaacuacaugguguacaccaucuucgucgugcugauccugcuguccgccgggcuggccaucgggcacgcuuacugggaggcccagguggggaacucgagcugguaucuguacgacggggaagacgacacccccuccuacaggggcuucuugaucuuuuggggcuacaucaucgugcugaacaccauggugccgauaagccuguaugugagcguggaggugauccgccuggggcagagccauuucaucaacugggaucuccaaauguauuacgccgaaaaggacacccccgccaaagccaggaccaccacccugaacgagcagcugggccagauccacuacaucuucagcgacaaaaccggcacccucacccagaacaucaugaccuucaagaagugcugcaucaaugggcagaucuacggcgaccauagggacgccagccagcacaaucauaacaaaauagagcaggucgacuuuuccuggaacaccuaugccgacggcaagcuggccuucuacgaccacuaccugaucgagcagauccagagcggcaaggagccggaggugaggcaguucuucuuccugcuggccgugugucacacggugaugguggacaggaccgaugggcagcugaacuaucaggccgcgagccccgacgagggggcccucgugaaugccgcccgcaacuucggcuuugccuuccuggcacggacccagaauacgaucaccaucagcgagcucggaaccgaaaggaccuacaacguacuggccauccucgacuucaacuccgacaggaagaggaugagcaucaucgugaggacccccgagggcaacaucaaacuguacuguaagggcgcggacaccgugaucuacgagcggcuccacaggaugaaucccaccaagcaggagacccaggacgcccuggacaucuucgccaaugaaacgcugagaacccugugccucugcuacaaagagaucgaggagaaggaguuuaccgaguggaauaagaaguucauggccgccagcguggccuccaccaaccgggacgaggcccuggacaaagucuaugaggagaucgagaaagaucugauccugcugggggcgacggccaucgaagauaaacugcaggauggcgugcccgagaccaucagcaagcuggcgaaggcagacaucaaaaucugggugcugacgggcgacaaaaaagagaccgccgagaacaucggcuucgccugcgagcugcugaccgaagacacgaccaucugcuacggcgaggacaucaacagucugcugcacgcccggauggagaaccagcggaacagaggcggcgucuaugccaaguucgcuccccccgugcaggaaagcuucuucccccccggcggcaacagggcccugaucaucacaggcagcuggcucaacgagauccuccuggagaagaagaccaaaaggaauaagauccugaagcucaaguuccccaggacggaggaggagaggaggaugaggacccaguccaagcgcaggcuggaggcgaagaaagagcagcgucagaagaacuucguggaccuggccugcgaaugcuccgccgucaucuguugccgcgugaccccaaaacagaaggccauggugguggaccuggugaagagguacaagaaggccaucacccuggccaucggagauggcgcgaacgacgucaauaugaucaagaccgcccacaucggcgugggaaucucgggccaggaggguaugcaggccgugauguccuccgacuacuccuucgcccaguuucgguaccugcagcggcugcugcugguccacggcagauggaguuacaucaggaugugcaaguuccugcgguacuucuucuacaaaaacuucgccuucacccuggugcacuucugguacagcuucuuuaacggguacagcgcgcagaccgccuacgaggacugguucauaacccuguacaacguccuguacacgucccugcccgugcugcugauggggcugcuggaucaggacguguccgauaagcugagccugagguuccccggccucuacaucgugggccagcgcgaccugcuguuuaacuacaagagguucuuugugagccugcugcauggggugcugaccagcaugauccucuucuucaucccccucggcgccuaccugcagacugucggccaggacggcgaggcccccagcgacuaccaaagcuucgccgugaccaucgccagcgcccucgugaucacggugaacuuccagaucggccuggacaccagcuacuggaccuuuguuaacgccuucagcaucuucggguccaucgcccuguacuucggaaucauguucgacuuucacuccgccgggauccacgugcucuuccccucggccuuccaguuuaccggcaccgcgagcaacgcccugcggcagcccuauaucuggcucaccauaauccucgccguggccgugugccugcugcccguggucgccauccgcuuccugucgaugacgaucuggccaagcgagagcgauaaaauccagaaacacaggaagcggcugaaggccgaggaacaauggcaacggcgccagcagguguucaggaggggggugagcacgaggaggagcgccuacgccuucagccaccagaggggcuacgccgaccugauuagcagcggccgcaguaucaggaagaagcgguccccccuggaugccaucguagccgacgggaccgccgaguaccgaaggaccggcgacagc

SEQ ID NO: 104 - RNA, 3753 nt, Artificial Sequence
  Synthetic Polynucleotide
augagcaccgaaagggacagcgagaccaccuucgacgaggacagccagcccaacgacgaggugguccccuacuccgacgacgagaccgaggacgagcuggacgaucagggcagcgccguugagcccgagcagaacagggugaaccgggaagccgaggaaaaccgugaacccuucaggaaggagugcaccuggcaggugaaggccaacgaucgcaaauaccacgagcagccccacuucaugaacaccaaguuccuguguaucaaggagucgaaguacgccaacaacgccaucaagaccuauaaguacaacgccuucaccuuuauccccaugaaucuguucgagcaguucaagagggccgccaaucuguacuuccuggcacuccucauacuccaagccgugccccagaucagcacccucgcgugguacaccacccuggucccccugcucgugguccugggggucaccgccaucaaggaccugguggacgacguggccaggcacaagauggauaaggagaucaacaaucgcacgugugaggugauaaaggacggcagguucaagguggccaaguggaaggagauccaggucggcgacguuaucaggcugaaaaagaacgacuucgugccggcagacauccugcugcuguccagcagcgagccuaacucccucugcuacguggagaccgccgagcuggacggcgagaccaaccugaaguuuaagaugucccuggagauaaccgaccaauaccugcagcgggaggauacccucgccaccuucgacggcuuuaucgagugcgaggagcccaacaaccgccuggacaaguucaccggcacccucuucuggaggaacaccagcuucccgcuggacgccgacaaaauccuccugaggggcugcgugaucaggaacaccgauuucugccauggccucgucaucuucgccggcgccgauaccaagaucaugaagaacagcggcaaaaccagguucaagaggaccaagaucgacuaccugaugaauuacaugguauacaccaucuucgugguccucauccugcuguccgcgggccuggccaucggccacgccuacugggaggcccaggugggcaacucgagcugguaucuguacgacggcgaagacgacacccccagcuacaggggguuucugaucuucuggggguacauaaucgugcugaacaccauggugcccaucagccuguacguaagcguggaggugaucaggcucggccaaucgcacuucaucaacugggaucugcagauguacuacgccgagaaggacacccccgccaaggcccgcacuaccacccugaacgagcaacugggccagauccacuauaucuucuccgacaaaaccggcacgcucacccagaauaucaugaccuucaaaaaguguugcaucaacgggcagauauauggggaccacagggacgccagccaacauaaccacaacaagauagagcaggucgauuuuuccuggaacacauaugccgacggcaagcucgcuuucuacgaccauuaccugaucgagcagauccaguccggcaaggagcccgaagugaggcaguucuucuuccugcucgccgucugucauaccgugaugguggaccgcaccgacggccagcugaacuaccaggccgccagccccgaugaaggcgcccucgugaacgccgccaggaacuuuggauucgccuuucuggcgaggacgcagaacaccaucaccaucucggagcugggcaccgagcggaccuacaacgugcuggccauccuggacuucaacagcgacaggaagagaaugagcaucauugugcgcacccccgagggcaauaucaagcuguacuguaaaggagcggacaccgucaucuacgagcggcugcauaggaugaaccccaccaagcaggagacccaagaugcccuggacaucuucgccaacgagacccugaggacccugugucugugcuauaaggagaucgaagaaaaagaguucacagaauggaacaagaaguucauggccgccagcguagcaagcacgaacagggacgaggcccuggacaagguguacgaggaaaucgagaaggaccugauccugcugggggcaacggccaucgaggacaaacuacaggacggggugcccgagaccauuagcaagcuggccaaggccgacaucaagaucugggugcugaccggcgacaagaaggaaaccgcagaaaacaucgguuucgcgugcgagcugcuaaccgaggacaccaccaucugcuacggcgaggacaucaacucccugcugcacgccaggauggagaaccagaggaaucgagguggggucuacgccaaguucgccccccccgugcaagagagcuucuucccccccggcgguaacagggcccugauaaucaccgggagcuggcugaacgagauccugcuagaaaaaaagaccaaaaggaacaagauccugaagcugaaguucccccgcaccgaggaagagcggcguaugcgcacccagagcaagcgcaggcuggaggccaagaaggagcagaggcagaagaacuucguggaccucgccugugagugcagcgccgugaucugcugccgggugacccccaagcagaaggccaugguggucgaccuggugaagcgguacaaaaaggcgaucacacuggccaucggggacggcgccaacgacgugaacaugaucaagaccgcgcacaucggggugggcaucagcggccaggaggggaugcaggcggugauguccuccgacuacagcuucgcgcaauuccgguaccugcagcgccugcugcuggugcacggacgguggagcuacaucaggaugugcaaauuucugcgguacuucuucuacaagaauuucgcguuuacgcuggugcauuucugguacagcuucuuuaacggcuacuccgcccagaccgcauacgaggacugguucauuacccuguacaacgugcuuuacaccagccugcccgugcugcuuaugggccugcuggaccaggacgugagugacaagcugucccugagguuccccggccuguacaucgugggccagcgcgaucugcucuucaacuacaagagguucuuugugagccugcugcacggcguccucaccagcaugauacuguucuucaucccccugggcgcguaccugcagacagucggccaggauggcgaagcaccgucggacuaccaguccuucgcugugaccaucgccuccgcccuggugaucaccgucaauuuccagaucggccuggacaccagcuacuggaccuucgugaaugcguucagcaucuucggcuccaucgcccuguauuucgguaucauguucgauuuucacuccgccggcauccaugugcuguuccccagcgccuuccaguucaccggcacggccagcaacgcccugaggcagcccuacaucuggcugaccaucauccuggccguggccgugugccugcugccagugguggccauacguuuccugagcaugaccaucuggcccuccgagagcgacaagauccagaagcauaggaagcgccugaaggccgaggaacaguggcagaggaggcagcaggucuuccggcggggcgugagcacccggagaucagccuaugccuucagccaccagcggggauacgccgaccucaucagcagcggcaggagcauccggaagaagagguccccucuggaugccaucguggccgacgggaccgccgaauaccgcaggaccggcgauucc

SEQ ID NO: 105 - RNA, 3753 nt, Artificial Sequence
  Synthetic Polynucleotide
augucgaccgagcgcgacagcgagaccaccuucgacgaggacagccagcccaacgacgagguggugcccuacuccgacgacgagaccgaggacgagcuggacgaucaggggagcgccguggaacccgagcagaauagggugaauagggaagccgaggagaaccgggaacccuuuaggaaggaaugcaccuggcaggugaaggccaacgacaggaaguaccacgaacagccccauuucaugaauaccaaguuucugugcaucaaagagagcaaguacgccaacaaugccauuaagacguauaaauacaacgccuucacauucauccccaugaaccuguucgaacaauuuaagcgcgccgccaaccuguacuuccucgcccugcugauccugcaggccgugccccagaucuccacccucgccugguacacgacccuggugccgcuccucgugguccugggcguuaccgccaucaaggaccucgucgacgacguagcccgccacaagauggacaaggagaucaacaacaggacaugcgaggugauaaaggacggccguuucaagguggcgaaguggaaggagauacaggugggcgacgugaucaggcugaaaaagaacgacuucgugccggccgacauccugcugcugagcagcagcgagccuaauucgcuguguuacguggagaccgccgaacucgacggugagaccaaccugaaguucaagaugucccuggagaucaccgaccaguaccuccagcgugaggauacacuggccaccuucgacggauucaucgagugugaggaaccgaacaacaggcucgauaaguucaccgggacccucuucuggcgcaacaccagcuucccgcucgaugccgacaaaauacugcugcggggcugcgugauccggaauaccgacuucugccaugggcuggugaucuucgcgggugccgacaccaagaucaugaagaacagcggcaagacgagguucaagcggaccaagaucgacuaccugaugaacuacaugguguacaccaucuucgugguacugauccugcugagcgccggucuggccaucgggcacgccuacugggaggcucaggugggcaacuccagcugguaccucuacgacggcgaggacgauacgccauccuaucgaggguuucugauuuucuggggcuacauaaucgugcucaauacgaugguccccaucagccuguaugucagcguggaagugaucagacugggccagucccacuucaucaacugggaccugcaaauguacuaugccgagaaggacacgcccgccaaggcccggacgacgacacugaacgagcagcugggccagauccacuacaucuucuccgacaaaaccggcacccugacccagaacaucaugaccuucaagaagugcugcaucaauggccagauauacggggaccacagggacgccagccagcauaaucauaacaagauugagcaggucgacuucagcuggaauaccuacgccgacggcaagcucgccuucuacgaccacuaccugaucgagcagauacaguccggcaaggagcccgaggugaggcaguucuucuuccugcuggccgucugccauaccgugauggucgacagaacggaugggcaacucaauuaucaggccgcgagccccgacgagggggcccuggugaacgccgccaggaacuucggcuucgccuuccucgccaggacccaaaacacgauaaccaucagcgagcugggcaccgagaggaccuacaacguguuggccauccuggacuucaacagcgaccgcaagcggauguccaucaucgugcguacgcccgaggggaacaucaagcuuuacugcaagggggccgacacggugaucuacgagaggcugcacaggaugaacccaacgaagcaagaaacgcaggacgcccuugacaucuucgcuaacgagacgcugaggacccugugccugugcuacaaggagaucgaggagaaggaguucacugaauggaacaagaaauucauggccgcgagcgucgccuccaccaacagggacgaggcccucgacaagguguacgaggagaucgagaaggaccugauccuccugggcgccaccgccaucgaagacaagcugcaagacggcgugcccgagaccaucagcaagcuggcgaaggccgacaucaagaucugggugcugaccggcgacaaaaaagagaccgccgagaauauaggcuucgcuugcgagcugcugaccgaggacacuaccaucugcuacggcgaggacaucaacucacugcuccacgccaggauggaaaaucaacgcaauagggguggcguguacgccaaauucgccccccccgugcaggagagcuuuuuuccccccggcggcaaucgggcccugaucauaaccggcuccuggcugaacgagauccugcuggagaagaagacgaagaggaauaagauccugaaacugaaguucccgaggaccgaagaggagaggcggaugaggacccaguccaagaggagacuggaggccaagaaggagcagcgccaaaagaacuucguggaccuggccugcgaguguagcgccgucaucuguugccgggugaccccgaagcagaaggcgauggucguggaccuggugaagcgguacaagaaggccaucacgcuggccaucggcgacggcgccaacgacguuaacaugaucaagaccgcccacaucggagucgggauuagcggccaggagggcaugcaggccgugaugagcuccgacuacagcuucgcccaauuccgauaucugcagaggcuccuccucgugcauggucgguggagcuacauccgaaugugcaaguuccugagguacuucuuuuacaagaacuucgccuucacgcuggugcacuucugguauagcuucuucaacggguacuccgcccagaccgccuacgaggacugguucaucacccucuacaacgugcuguacaccagccugccggugcugcugaugggucugcuggaccaggacguguccgacaagcugagccuccguuuccccggccuguauaucgugggacagagggaccugcuguuuaacuacaagagguuuuucguuagccugcugcacggggugcugaccuccaugauccuguucuucaucccccugggggccuaccugcagaccgucggacaagacggggaggcccccagcgacuaccaguccuuugccgugaccaucgccuccgcacucgugauaaccgugaacuuccagaucggacuggacacaagcuacuggaccuuugugaacgccuucagcaucuucggcagcaucgcccuguacuucggcaucauguuugauuuccauagcgccgggauccacgugcuguucccgagcgccuuccaguuuaccgguaccgcguccaaugcccugcggcagcccuacaucuggcucaccaucauccuggccgucgccgugugccuccugcccgugguggccauuagguuccuguccaugaccaucuggcccuccgagagcgacaaaauccagaaacacaggaagcgccugaaggccgaggagcaauggcagcgacggcagcagguguucaggaggggcgucagcaccaggagguccgccuacgccuucagccaccagaggggcuacgcggaccugaucagcuccgggagguccaucaggaaaaagcgguccccccucgacgccaucguggcggacggcaccgccgaguaccggaggaccggcgacagc

SEQ ID NO: 106 - RNA, 3753 nt, Artificial Sequence
  Synthetic Polynucleotide
auguccacugagagggacucagagaccaccuucgacgaggacagccagccgaacgacgagguggugcccuauagcgacgacgagacggaggacgagcuggacgaucaggggagcgccguggagcccgaacagaaccgugucaaccgggaagccgaggagaacagggagcccuuccgcaaggaguguaccuggcaggugaaggccaaugaccgcaaguaccacgagcaaccgcauuucaugaacacgaaguuccuguguaucaaggagagcaaauacgcgaacaacgcgaucaagaccuauaaguacaaugccuuuaccuucauccccaugaaccucuucgaacaguucaagagggcagccaaccuguacuuccucgcgcuacucauccuccaggccgugccacagaucuccacgcuggccugguacaccacccuggugccccugcuggucgugcugggcgugaccgccauaaaggaccugguggaugacguugccagacacaagauggacaaggagaucaauaaccggaccugcgaggugaucaaggauggcagguucaagguggcgaaguggaaagagauccaggugggcgacgugauccggcugaaaaagaacgacuucgugcccgccgacauccugcugcucuccagcucagagcccaacagccugugcuacgucgagaccgccgagcuggauggcgagaccaaccugaaguucaaaaugucccuggagauaacugaucaguaucugcagagggaggacacgcuggccaccuucgauggcuuuaucgagugcgaggagcccaacaacaggcucgauaaguucacgggaacccucuucuggcggaauaccagcuucccccuggacgccgacaagauccugcugaggggaugcgucauccgcaacacagacuucugucacggccucgucaucuucgccggggccgacaccaagaucaugaagaauuccggcaagaccagguucaagaggaccaagaucgacuaccugaugaacuacaugguguacaccauuuucgucgugcugauccugcugagcgccggccuggccaucggucaugccuacugggaggcccaggucgggaacagcagcugguaccuguacgacggcgaggacgacacgcccagcuacaggggcuuccugaucuucuggggcuacauaaucgugcugaacaccauggugcccaucucccucuacguuagcguggaagugaucaggcugggccagucccacuucaucaacugggaccugcagauguacuacgccgagaaggauacccccgccaaagccaggaccacgacgcugaacgagcagcugggccaaauccauuacaucuucagugauaaaaccggcacccugacccaaaacaucaugaccuuuaaaaagugcugcaucaauggccagaucuacggagaccacagggacgccagccagcacaaccacaacaagaucgagcagguggacuuuagcuggaacacuuacgccgacgggaagcucgccuucuacgaucauuaccugaucgaacagauccagagcggcaaagaacccgaggugaggcaguucuuuuuccuccucgccguaugucacaccgugaugguggacaggacggacgggcagcucaacuaccaggccgccagccccgacgagggcgcccuggugaacgccgcccggaacuuuggauucgccuuccuggcacgcacccagaauaccauaacgaucucggagcugggcaccgaaaggacguacaacgugcucgcuauccuggacuucaacagcgaccggaagaggauguccauaaucgugaggacccccgagggcaacaucaagcuuuacuguaagggggccgacacagucaucuacgaaaggcugcaucgcaugaaccccacgaaacaggagacccaggaugcccuggacaucuuugccaacgagacccugaggacccuguguuuaugcuacaaggaaaucgaggagaaggaguucaccgaguggaacaagaaguucauggccgcguccguggcgagcaccaacagggacgaggcccuggacaagguuuaugaggagaucgagaaggaccucauccugcugggggccaccgccaucgaggacaaacugcaagauggagugccagagaccaucagcaagcuggccaaggccgacaucaagaucugggugcugaccggcgauaagaaagagaccgccgagaacaucggcuucgcgugcgaacugcugaccgaggacacgaccaucuguuacggcgaggacauuaacagccugcugcacgccagaauggagaaucagaggaacaggggcggaguguacgccaaguucgccccccccguccaggaaagcuuuuucccgcccggaggcaacagggcccugauaaucaccgggagcuggcugaacgagauccucuuggagaagaaaaccaagaggaacaagauacucaagcuuaaguuuccccgaaccgaggaggagcggaggaugcgcacccagagcaagaggaggcuggaggccaagaaagagcagcgccagaagaacuucgucgaucuggccugcgaaugcuccgccgugauaugcugcagggugacccccaagcagaaggccauggugguggaccuggucaaaagguacaagaaggccaucacccucgccaucggggacggcgccaacgacgucaacaugaucaagaccgcccauaucggcgugggcauaagcggccaggaaggcaugcaggccgugauguccuccgacuauagcuucgcccaguucagguaccugcagcggcugcugcuggugcauggacggugguccuacauccgcauguguaaguuccuccgguacuucuucuauaagaacuuugcguucacccuggugcacuucugguacagcuucuucaauggcuauagcgcccagaccgccuacgaagacugguucaucacccuguacaacgugcuguacaccagccugcccguccugcugauggggcuucuggaccaggacgucagcgacaagcugagccuccgcuuccccgggcuguacaucgucggacagagggaccuccucuucaauuacaagagguucuucgugucccugcuccauggcgugcugaccagcaugauccuguuuuucaucccgcuuggggccuaccugcagaccgugggccaggacggagaggcacccagcgacuaccaguccuuugccgugaccaucgcguccgcccuggugaucaccgugaacuuucagauaggucuggacaccuccuacuggacguucgugaacgccuucagcaucuucggcagcauagcccuguacuucgguaucauguucgauuuccacagcgccggcauccacgugcucuuucccuccgccuuucaguucaccggcaccgccagcaacgcacugcgccagccuuacaucuggcugacgaucauccuggccguggccgugugccugcugcccgucguggccauccguuucuugagcaugaccauuuggccgagcgagagcgacaagauccagaagcacaggaagcggcugaaggccgaggaacaauggcagcgucggcagcagguuuucaggaggggcgugagcacccggaggucugccuacgccuuuucccaccagagggguuaugccgaccugaucagcagcgggaggagcaucaggaagaagaggagcccccuggacgccaucgucgccgacggcaccgcugaguaccgcaggaccggcgauagc

SEQ ID NO: 107 - RNA, 3753 nt, Artificial Sequence
  Synthetic Polynucleotide
augagcaccgagagggacuccgagaccacuuuugacgaggauagccagcccaacgacgaggugguacccuacuccgacgacgagaccgaggacgaacuggacgaccagggcagcgccguggagcccgaacagaaccgcgugaauagggaggccgaggagaaccgggagcccuucaggaaggagugcaccuggcaggugaaggccaacgacagaaaauaccacgagcagccccacuucaugaauaccaaguuccugugcaucaaagagagcaaguacgccaacaacgcgaucaagaccuauaaguacaacgccuucaccuuuauccccaugaaccuguucgagcaguuuaagcgagccgccaaccuguacuuccuggcccugcugauccugcaggccgugccccagaucagcacccuugcuugguacaccacccuggucccccugcuggucgugcucggagugaccgccaucaaggaccugguggacgacguagcccggcacaagauggacaaggagaucaacaaccgcaccugcgaagugaucaaggacggccgguuuaagguggcgaaguggaaggaaauccaagugggcgacgugauccgccugaaaaaaaacgauuucgugcccgcagacauccuccuccugagcagcagcgagcccaacagccuguguuacguggagaccgcagagcuggacggggagaccaaucugaaauucaagaugagccuggagauaacugaccaauaccugcagagggaggacacccuggccaccuucgauggcuucaucgagugcgaggagcccaauaacaggcuggacaaguuuaccggcacccuguucuggcgcaacaccuccuucccccucgacgccgacaagauccugcugcggggcugcgugauucgaaauaccgauuucugccacggccuggugaucuucgccggcgccgacaccaagaucaugaagaacagcggcaagaccagguuuaagaggaccaagaucgauuaccugaugaacuacauggucuacaccaucuucguggugcugauccugcugagcgccggccuggccaucggccaugccuauugggaggcccaggugggcaacuccagcugguaucuguacgacggagaggacgacacccccagcuauaggggcuuccugaucuucugggguuacaucaucgugcugaacacgauggugccaauuagucuguacgugagcguggaggugaucaggcugggucagagccacuuuaucaacugggaccuccaaauguacuaugccgagaaggacaccccagccaaggccaggaccaccacacugaacgagcagcugggccagauccacuacaucuucuccgacaaaaccgguacccugacccagaauaucaugaccuuuaagaagugcugcaucaacgggcaaauauacggcgaucaucgcgacgccucucagcacaaccauaauaagaucgagcaagucgauuucuccuggaacaccuacgccgacggcaaacuggccuucuacgaucacuaucugaucgagcagauccagagcggcaaggagcccgaggucaggcaguucuuuuuucugcucgcugucugucacaccgucaugguggaccgcaccgacggccaacugaacuaucaggccgcgucccccgacgaaggggcccuggucaacgccgccaggaacuuuggcuuugccuuccuggccaggacccagaacaccaucaccaucagcgagcucggcaccgaacgcacguacaacgugcucgccauucuggacuucaacuccgacaggaagcggaugagcaucaucgugaggacccccgagggcaacaucaagcucuacugcaagggcgcggacaccgugaucuacgagcggcugcaccgaaugaaccccaccaagcaggaaacccaggacgcccuggacaucuucgcgaacgagacgcugcgaacccugugucugugcuacaaggagaucgaggagaaggaguucaccgaguggaacaagaaguucauggccgccuccguggccucgaccaaccgggaugaggcccuggauaagguguaugaggagaucgagaaggaccugauacugcugggcgccaccgccaucgaggacaaacugcaggauggcgugcccgaaaccaucagcaagcuggccaaagccgacaucaagaucugggugcucaccggagacaagaaggaaaccgccgagaauauaggguucgccugugagcuccugaccgaagacaccaccaucugcuacggcgaggacaucaacagccugcugcacgcccggauggagaaccagcggaacaggggcgggguguacgcgaaauucgcccccccggugcaggagagcuucuucccccccggcggaaacagggcccugaucaucaccggcagcuggcugaacgagauccugcuggagaagaaaaccaaacggaacaagauccugaagcuaaaauuuccgaggaccgaggaagaaaggaggaugcgcacccagagcaagaggaggcuggaagccaagaaggagcagaggcagaagaacuucguggacuuggccugcgagugcucagccgugaucugcugccgcgugacccccaaacagaaggccaugguggucgaccuggugaagagguauaagaaggccaucacccuggcaaucggcgacggagccaaugacgugaauaugaucaaaaccgcccacaucggcgugggcaucucggggcaggagggcaugcaagccgugaugagcagcgacuacagcuucgcccaguuucgguaccugcagcggcugcuccuggugcauggccgauggagcuacauccgcaugugcaaguuccugcgcuacuucuucuacaaaaacuuugccuucacccuggugcacuucugguacagcuucuucaacggauacuccgcccagaccgccuacgaggacugguucaucacccuuuacaacgugcuguacaccucccucccgguccugcugauggggcuucuggaccaggacguguccgacaaacucagccugagguuccccggccuguacaucgugggccagcgggaucuccuguucaacuacaaaagauucuucgucucccugcugcacggagugcugaccuccaugauccuguucuucauaccacugggcgccuaccugcagaccgucggccaggacggcgaggcccccucggacuaccagagcuucgccgugaccaucgccagcgcccugguuaucaccgugaauuuucagaucggccuggauacuagcuauuggaccuucgugaacgccuucagcaucuucggcucgaucgcgcucuauuucgguaucauguucgacuuccacagcgccggaauccacguccuguucccguccgcauuccaguucaccgggaccgccagcaaugcccucaggcagccguacaucuggcucaccaucauccucgccguggccgugugccugcugccagucguggccaucagauuccuguccaugacgauauggcccucagaguccgacaaaauccagaagcaccgcaagcggcugaaggcggaggagcaguggcagcggcggcagcagguguuuaggcgcggcgucagcacccgccggagcgccuacgccuucucccaccagaggggcuaugccgaucugaucagcagcggcagguccauccggaagaagcgcagcccccuggacgccaucgucgccgacgggacggccgaauauaggaggaccggcgacagc

SEQ ID NO: 108 - RNA, 3753 nt, Artificial Sequence
  Synthetic Polynucleotide
augagcaccgagagagauagcgaaaccaccuuugacgaggacagccagccaaacgacgagguugugccuuacagcgacgacgagaccgaggacgagcuggacgaccagggcagcgccguggagcccgagcagaaucgugucaauagggaagccgaagagaacagggagcccuuucgcaaggagugcaccuggcaggucaaggccaaugaccgaaaguaccacgagcagccgcacuucaugaauaccaaguuccugugcauaaaagagagcaaguacgcgaacaacgccaucaagaccuacaaguacaacgccuucaccuucauccccaugaaccuguuugagcaauucaagagggcggccaaccuguauuuccuggcccugcugauccugcaggccgucccccagaucuccacccuggccugguacaccacccuggugccccugcugguggugcugggcgugaccgcuauaaaggaccuggucgaugauguggccagacauaagauggacaaggagaucaauaaccguaccugcgaagucaucaaggaugggcgguucaaaguggccaaguggaaagagauccaggugggggacgugauccgccugaagaaaaacgacuucgugcccgcggacauccuccugcucuccagcagcgagcccaacagccugugcuaugucgagaccgccgagcuugacggggagaccaaccugaaguuuaagaugucccuggaaaucaccgaccaguaccuccagagggaggacacccuggccaccuucgacggguucaucgagugugaggagcccaacaauagacuggauaaauucacgggcacccuguuuuggcgaaacacauccuucccccuggacgcggacaagauccugcucaggggcugcgugauccgaaacaccgacuucugucauggccuggugaucuucgccggggcggacacgaagaucaugaagaauuccgguaagaccagguucaaaaggacaaagaucgacuaccugaugaacuacaugguguauaccaucuucguggugcugauccuccugagcgccggccuugccaucggccaugccuacugggaggcccaggugggaaacagcagcugguaccuguacgauggcgaggacgacacccccagcuacagggguuuccugaucuucuggggguacaucaucgugcuaaacaccauggugcccaucagccucuaugugagcguggaggugauccggcugggccagagccacuucaucaauugggaccugcagauguauuacgccgaaaaggacacccccgccaaggcucgaaccaccacccugaaugagcagcugggccagauccacuacauuuucuccgacaagacgggcacccugacccagaacaucaugaccuucaagaagugcuguaucaacggccagaucuauggcgaccacagggaugccagccagcacaaccacaacaaaaucgaacagguggacuucagcuggaacacguaugcggacggcaaacuggccuucuacgaccacuaccugaucgagcagauccagucuggcaaagagcccgaagugcgucaguucuucuuucugcuggccgucugccacaccgucaugguggaccgcaccgacggccaacugaacuaccaggccgcgucccccgacgagggcgcccuggugaacgccgcgcguaacuucggguucgccuuccuggcccgcacccagaacaccaucaccaucagcgagcuggggaccgagaggaccuauaaugugcuggccauccuggacuuuaacagcgaccggaaacgcaugagcaucauaguaaggacccccgagggcaacaucaagcuguacugcaagggggccgacaccgugauauacgagagguugcacaggaugaacccaacgaaacaggaaacgcaggacgcgcuggacaucuuugccaacgagacacuccguacucugugccucugcuacaaggagaucgaggaaaaggaguuuaccgaauggaacaagaaauucauggccgccagcguggccuccaccaaccgcgacgaggcccuggacaagguguacgaggagaucgagaaggaccucauccuccugggcgcgaccgccaucgaggacaagcugcaggacggcguccccgagaccaucagcaagcucgccaaggcagacaucaagaucugggugcugaccggagacaaaaaggagacggccgaaaacaucggguucgccugcgagcugcugacagaggacaccaccaucugcuauggcgaagauaucaacucgcugcugcacgcccgaauggagaaccaacggaauaggggcggcgucuacgccaaguucgccccccccguccaggaaagcuucuuccccccgggcgggaaccgggcccugaucaucaccggcagcuggcucaacgagauccugcucgaaaagaagaccaagaggaacaagauccucaagcucaaguuccccaggacagaggaggagaggaggaugaggacccaaagcaagcggcggcuggaggccaagaaggagcaaaggcagaagaacuuuguggaccuggccugcgagugcagcgccgugaucuguuguagggucacccccaagcagaaggccauggucguggaccuggugaagagguacaagaaggccaucacccuggccaucggggacggcgccaacgacgugaacaugaucaagaccgcccacaucggcgugggcaucuccggucaggaagguaugcaggccgugauguccuccgacuacuccuuugcgcaguuccgguaccugcaacgucugcugcuggugcauggcagguggagcuacaucaggaugugcaaguuucugcgguauuuuuucuauaagaauuucgccuucacccuggugcacuucugguacagcuucuucaacggcuauagcgcccagaccgccuacgaggauugguucaucacccuguacaacgugcuguacaccagccuccccgugcugcugaugggccugcuggaucaggacgugagcgacaagcugagccugcgguuccccggucuguauaucgugggacaacgggaccugcuguucaacuacaaaagguucuucgucagccuccugcacggggugcugaccuccaugauacucuucuuuaucccucugggcgcguaccugcagaccgugggccaggauggggaggcgcccagcgacuaccagucguucgccgugaccaucgccucagcccucgugaucaccgugaacuuccagaucgggcuggauaccagcuacuggaccuuugugaacgccuucaguaucuucggcagcaucgcccuguacuucggcauaauguucgacuuucacagcgccggaauccacgugcuguuccccagcgccuuccaguuuacggguaccgccuccaacgcccugcggcagcccuauaucuggcucaccaucauucuugccguugcggucugccuccugcccgucguggccauccgguuccucagcaugaccaucuggcccagcgagagcgacaagauccagaagcacaggaaacggcugaaggccgaagagcaguggcagaggaggcagcagguguuuaggaggggcgucagcacccgacggucggccuacgccuuuucgcaccaacgaggguacgccgaccugaucagcuccggccgguccauccgaaagaagagguccccgcuggacgccaucgucgcagacggcaccgccgaguaucggaggacgggcgacagc

SEQ ID NO: 109 - RNA, 3753 nt, Artificial Sequence
  Synthetic Polynucleotide
augagcaccgagagggacagcgagaccaccuuugacgaggacucccaacccaacgacgaggucgucccguacagcgacgacgaaaccgaggacgaacuggacgaucagggguccgccguggagcccgagcagaaccgggugaaccgcgaggccgaagagaaccgcgagcccuucaggaaagagugcacauggcaagugaaggccaacgacaggaaguaccaugagcagccucacuucaugaacaccaaguuucugugcaucaaggaguccaaguacgccaacaaugccaucaagaccuauaaguacaacgccuucaccuucauccccaugaaccucuucgagcaguucaagcgggccgcgaaccuguacuuucuggcgcugcugauccuacaggccgugccccagaucuccacccuggcaugguacaccacccuggugccgcugcugguggugcugggggugaccgccaucaaggaucugguggacgacgucgcccggcauaagauggacaaggaaaucaacaauaggaccugcgaggugaucaaggacggcagguucaagguggccaaguggaaggagauccaagugggcgacgugauccgccugaagaagaaugauuucgugcccgcggacauccugcuccuuagcagcagcgaaccuaacucccucugcuacguggagaccgccgaacuggacggcgagaccaaccugaaguucaagaugagccuggaaaucacggaccaguaccugcagcgcgaggacacccucgcgaccuucgacggauuuaucgaaugcgaagagcccaacaacaggcuggacaaguucaccgggacccuguucuggaggaacaccagcuuuccccuggaugccgauaagauccugcugcgcggcugcgucauuaggaauaccgacuucugccacggccuggucaucuucgccggcgccgacaccaagaucaugaagaauagcgggaagacaagguucaagcgaaccaagaucgacuaccugaugaauuacaugguguacaccaucuuugucgugcugauccugcucagcgccggccuggccaucggccacgccuacugggaggcccaggugggcaacuccagcugguaucuguacgauggggaggacgacacccccagcuaccgcggguuccugaucuucuggggguacaucauaguccuuaauaccauggugcccaucagccucuacgugagcguggaagugauccggcugggccagagccauuuuaucaauugggaucuccaaauguacuaugccgagaaggacacccccgccaaggccaggacgaccacccugaacgagcagcugggacagauccacuauaucuucagcgacaagaccgggacccugacccagaacaucaugaccuucaaaaaguguugcaucaauggccaaauauacggcgaccaccgcgacgccagccagcacaaccacaacaagauagagcaggucgacuucuccuggaacaccuacgccgaugggaagcucgcguucuacgaccacuaccugaucgagcagauccaguccgggaaggagcccgagguccgccaguuuuucuuccugcuggccgugugccauaccgugaugguggaccgaaccgacgggcagcugaacuaccaggcagccucccccgacgaaggcgcccuggugaaugccgccaggaacuucggcuucgcguuucuggccaggacccagaacacgauaacaaucuccgagcugggcaccgagcggaccuacaacgugcuggccauccucgacuucaauuccgacaggaagaggauguccaucaucgugaggacccccgagggaaacauuaaacuguacugcaaaggcgccgacaccgugaucuacgagcgccuccaccgaaugaaccccaccaagcaggagacccaggaugcccuggacaucuucgcgaaugagacgcuccgcacccugugccucugcuacaaagagaucgaggagaaggaauucaccgaguggaacaagaaguucauggccgccuccgucgccagcaccaaccgggacgaggcccuggacaagguguacgaagaaaucgagaaagaccugauacugcugggcgccaccgccaucgaagacaaacugcaggacggcgugcccgagaccaucagcaaacuggccaaggccgacaucaaaaucugggugcucaccggggacaaaaaggaaacggccgaaaacaucggcuucgcuugcgagcugcugaccgaggauaccaccaucugcuauggagaggacaucaacucccugcugcacgcgaggauggagaaucagaggaaccgcggcggcguguacgccaaguucgcgccccccgugcaagaaagcuucuucccccccggcgguaacagggcgcugaucaucaccgggagcuggcugaacgagauccugcuggagaagaagaccaagcgcaacaagauucugaagcucaaguucccccgaacagaggaggagaggcggaugcggacccagucaaagaggaggcuggaagccaagaaggagcagaggcagaagaacuucguggaccuggccugcgagugcagcgccgucaucugcuguagggucacccccaaacagaaagcaauggugguggaccuggugaagagguacaagaaggcgaucacccuggccauaggcgacggggccaacgacgugaacaugaucaagacggcgcauaucggcgugggcaucagcggccaggaagguaugcaggccgugaugagcagcgacuacagcuuugcgcaguuccgguaccuccagaggcuccugcugguccauggcagguggagcuacaucaggaugugcaaguuucucagguacuucuucuacaagaacuucgccuucacccuggugcacuucugguacagcuucuucaauggguacuccgcccagaccgccuacgaggacugguucaucacccuguacaacgugcuguacaccagccugcccgugcugcugauggggcugcuggaccaggacguguccgauaagcugagccucagguucccgggccuguacaucgugggccagcgggaccugcuguuuaacuacaaacgguucuucgugagccuccugcacggcgugcucaccagcaugauccucuucuuuaucccccugggagccuaccugcagaccguggggcaggacggggaggcccccagcgacuaccaguccuuugcggugaccaucgccuccgcccuggugaucaccguuaacuuucagaucggccucgacaccagcuacuggacguucgugaacgccuucuccaucuucggcaguaucgcccuguacuucggcaucauguucgacuuucacagcgccggcauccacguccuguuucccagcgccuuucaguucaccggaaccgccagcaacgcccugaggcagcccuacauauggcugaccauaauccuggccguggcagugugccugcugccuguaguggccauccgcuuccuguccaugaccaucuggccguccgagagcgacaagauccagaagcaucgcaagcggcugaaggccgaggagcaguggcagaggcgccagcaaguguucaggcgcggcgucuccaccaggaggucggccuacgccuucagccaucagcggggcuaugcggaccucaucagcucgggccguagcaucaggaagaaacggagcccccucgacgccauaguggccgauggaaccgccgaguacaggaggaccggcgacucc

SEQ ID NO: 110 - RNA, 3753 nt, Artificial Sequence
  Synthetic Polynucleotide
augagcaccgagcgagacuccgagacgaccuuugacgaggacucccagcccaacgacgagguggugccguacagcgacgacgaaaccgaggacgagcuggacgaucagggcagcgccguggagccggagcagaacagaguuaaucgggaggccgaggagaacagggagcccuucaggaaggaguguaccuggcaggugaaggccaacgauaggaaguaucacgagcagccccacuucaugaacaccaaguuucugugcauuaaggagagcaaguacgccaacaacgccaucaagaccuacaaguacaacgccuucaccuucauccccaugaaccucuucgagcaauucaagagggcggccaaucuguacuuccucgcccugcugauccugcaagccgucccucagaucagcacccuggccugguauaccacccuggugccccugcugguggugcugggagugacggccaucaaggaccugguagacgaugucgccaggcacaagauggacaaggagaucaacaauaggaccugcgagguaaucaaggacggccgcuucaaagucgcgaaguggaaggagauacaagugggggacgugauucggcucaagaaaaacgauuucgugcccgccgauauucugcugcugagcagcagcgagccgaacagccugugcuauguggaaaccgccgagcuggacggcgaaaccaaccugaaguucaaaaugagccuggaaauaaccgaccaguaucuucaaagggaggacacccuggcgaccuucgacggguucaucgagugcgaagagcccaacaaccggcuggacaaguucaccggaacccuguucuggaggaacaccagcuucccccuggacgccgauaagauccugcugagaggcugugugauccggaacaccgauuucugccacggccuggugaucuucgcgggcgccgacacaaagaucaugaagaacagcgguaagacaagguucaagcggaccaagaucgauuaccugaugaauuacaugguguauaccaucuucguggugcugauccugcuguccgcgggccuggcgaucggccaugccuauugggaggcgcaggugggcaacagcagcugguaucucuacgauggcgaggacgacacccccuccuaucguggcuuucugauauucuggggcuauaucaucguccucaacaccauggugcccaucagccucuacgucuccgucgaggugaucaggcugggacagucgcacuuuaucaauugggaucugcagauguacuaugccgagaaggauaccccagccaaggcccggaccacgacccugaacgagcagcuggggcagauccacuauaucuuuagcgauaagaccgggacccuaacccagaacaucaugaccuucaaaaagugcugcauuaacggccagaucuacggcgaucacagagacgccagccagcacaaccacaacaagaucgagcagguggauuuuuccuggaauacuuacgccgacggaaagcuggccuucuaugaccacuaccugaucgaacaaauccaguccggcaaggagcccgaggugcgccaguuuuucuuccuucuggccgugugccauaccgugaugguggaccggaccgacgggcagcugaacuaccaggccgccagccccgacgagggggcccuggucaacgccgccaggaacuucggauucgccuuucuggcgaggacccagaacaccaucaccaucuccgaacuggggaccgagcggacauacaacgugcuggccauccucgacuuuaacucggaucggaagcguauguccaucaucgucaggaccccggaagggaacauaaagcuguauuguaagggggccgauaccgugaucuacgagcgccugcacaggaugaaccccaccaagcaggagacccaagacgcccuggauaucuucgccaacgagacccugcgcacccugugccugugcuacaaggagaucgaggagaaagaguuuaccgaguggaacaagaaguuuauggccgccagcguggccagcaccaacagggaugaggcccuggacaagguguaugaggagaucgagaaggaccucauccuguuaggugccaccgccauagaggacaagcuccaggacggggugcccgagacaaucucgaagcucgccaaggccgacaucaagaucugggugcugaccggcgacaagaaggagaccgccgagaacaucggcuucgccugcgagcugcugacggaggacaccaccaucugcuacggcgaggacaucaacagccugcugcacgccaggauggagaaccagcguaaccggggcggcgucuacgccaaguucgccccccccgugcaggagagcuucuuuccacccggaggcaacagggcccugaucaucacuggcagcuggcugaacgaaauccugcucgaaaaaaagaccaagaggaacaagauccugaagcugaaguuccccaggaccgaggaggaaaggaggaugaggacccaguccaagaggcgacucgaggccaaaaaagaacagaggcagaagaacuuuguggaccuggccugcgaguguagcgccgugauuugcugccgagugaccccaaagcagaaggccauggugguggaccugguaaagagguacaagaaagccaucacgcuggccaucggcgacggcgccaacgacgugaacaugaucaagacagcgcauauaggcgugggcaucagcggccaggaaggcaugcaggccgucaugagcuccgacuacagcuucgcccaguucagguaccugcagcggcugcugcucgugcacgggcgguggagcuacaucagaaugugcaaguuccugagguacuucuucuacaagaacuucgccuucacccuggugcacuucugguacagcuucuuuaacggcuacuccgcgcagaccgccuaugaggacugguucauaacccuguacaacgugcuguacaccucccuacccguccuccucaugggacugcucgaccaggacgugagcgauaagcugucccugagguuccccgggcuguacaucguggggcaaagggaccugcuguucaacuacaagcgcuuuuucgugagccuguugcacggggugcugaccagcaugauccucuucuuuauuccccucggggccuaccugcagaccgucggccaggacggggaagcgcccuccgauuaccagagcuucgccgugaccaucgccucggcgcuggugaucaccgugaacuuccagaucgggcuggacaccagcuacuggaccuucgugaacgccuucagcaucuuugggucgaucgcccuauacuucggcaucauguucgacuuucacuccgccgguauccacgugcuguuccccagcgccuuccaguucaccggcacggccuccaacgcccugaggcaacccuacaucuggcugacaaucauccuggccguggcgguaugucugcugccgguuguggccaucagguuccugagcaugaccaucuggcccuccgagagcgacaagauccagaagcaccgcaagcgacugaaggccgaggagcaguggcagaggcgacagcagguguucaggcgaggcgugagcaccaggcguagcgccuaugccuucagccaccagaggggcuacgccgaccucaucagcuccggccgguccaucaggaagaagagguccccccuggacgcuaucguggcagaugggaccgccgaauacaggaggacuggcgacagc

SEQ ID NO: 111 - RNA, 3753 nt, Artificial Sequence
  Synthetic Polynucleotide
augagcaccgagcgggacagcgagaccaccuuugacgaggacucccaaccgaacgacgaagugguccccuacagcgacgacgagaccgaggacgagcuggacgaccaggggagcgccguggaaccggagcagaacagggugaaucgggaagccgaggagaaucgggagcccuucagaaaggaguguaccuggcaggugaaagcgaacgaucgaaaguaccacgagcagccccauuucaugaacaccaaguuccugugcaucaaagagagcaaguacgccaacaacgcgaucaagaccuacaaguacaaugccuucacauucauccccaugaaccuguucgagcaguucaagagggccgcgaaccucuauuuccucgcccugcugauccugcaggcggugccccagaucagcacccuggccugguacacaacccuggugccccuccugguggugcucggggucaccgccauaaaggaccugguggacgacguggcgaggcacaaaauggacaaagagaucaacaacaggaccugcgaggugaucaaagauggcagguucaagguagccaaauggaaggaaauacaggugggcgacgugauccggcugaagaagaacgacuucguccccgcggauauccugcugcucuccuccucggagcccaacagccuguguuacguggagacagccgagcuggauggcgaaaccaaucugaaguucaagaugagccuggaaaucaccgaccaauaccugcagcgggaggacacccuggccaccuucgauggcuuuauagagugcgaggagcccaacaaucgccuggauaaguucacggggacccuguucuggcggaacaccagcuucccccuggacgccgacaagauccugcugaggggcugcgugaucaggaacaccgacuucugccacggccucgugaucuuugcgggggccgacaccaagaucaugaagaacagcgggaagaccagguucaagaggaccaaaaucgacuaccugaugaacuacaugguguacacuaucuucgugguccugauccugcuauccgcaggacucgccaucggccacgccuacugggaagcccaggugggcaacagcucgugguaccuguacgacggcgaggacgacacccccucuuacaggggcuuccugaucuuuuggggauauaucaucgugcucaacaccauggugcccaucucgcuguacgucuccguggaggugauaaggcugggccagagccacuuuaucaauugggaucugcagauguacuacgccgagaaggacacuccugcuaaggccaggaccacgacccucaacgagcagcugggccaaauccacuacaucuuuagugacaagaccggcacccugacccagaacaucaugaccuucaagaagugcugcaucaacggccagaucuacggcgaccacagggaugccagccagcauaaccacaacaagaucgagcagguugacuucagcuggaacaccuacgcggacggcaagcuggccuucuacgaccacuaucugaucgagcagauccagagcggcaaggagcccgaggugcggcaguucuucuuucugcuggccguuugccacaccgugaugguggacaggaccgauggccagcugaacuaccaggccgcaagccccgacgagggcgcccuggucaacgcggccaggaacuuuggcuucgccuuccuggccaggacccagaacaccaucaccaucuccgagcugggaaccgaaaggaccuauaacguccuggccauccuggacuucaacagcgacaggaagaggauguccaucaucgugaggacccccgaggggaacaucaagcucuacuguaagggcgccgacaccgugaucuacgagcgccuccacaggaugaaucccaccaagcaagagacccaggacgcccucgauaucuuugccaaugagacgcucaggacccucugucugugcuacaaagagaucgaggagaaggaguucaccgaguggaacaagaaguucauggccgccagcguggcgagcaccaaccgggacgaggcccucgacaagguguacgaggagaucgagaaggaccucauacugcucggagccaccgcaaucgaggacaagcugcaggacgggguuccggagaccaucuccaagcuggccaaggccgacaucaaaaucugggugcugaccggggacaagaaggagaccgccgagaacaucggcuucgccugcgagcugcugaccgaggacaccaccaucugcuauggugaggacaucaauagccuacugcacgcccguauggagaaccagcggaaucggggcgggguguacgccaaguucgcgccccccgugcaggagagcuucuucccccccgguggaaacagagcccugauaaucaccggcagcuggcucaacgagauccugcuggagaagaaaaccaagaggaacaaaauccugaagcugaaauucccccggaccgaggaggaaaggcgaaugaggacccagagcaagagacgccuggaggccaagaaagaacagcggcagaagaacuucguggaucucgccugugaaugcagcgccgugaucugcugcagggugacccccaagcagaaggcgauggugguggaccuggugaagagguacaagaaggccaucacccuggccauuggcgacggggccaaugacgucaacaugauaaaaaccgcgcacaucggcguggguaucagcggccaggagggcaugcaggccguaaugagcuccgauuacucguucgcccaguuucgcuaccuccagcgccugcugcuggugcacgggagguggagcuauaucaggaugugcaaguuccugcgguacuucuuuuacaagaauuucgccuucacgcuggugcauuucugguauagcuucuuuaacggcuauuccgcccagacagccuacgaagauugguucaucacgcucuacaacgugcuguacaccagccugcccgugcugcugaugggccugcuggaccaggacguaagcgacaaacugagccugcgcuuucccgggcuguacaucgucggccagcgugaccuccuguucaacuauaagagguucuucgugucacugcugcacggcgugcugaccuccaugauccuguucuuuaucccccugggcgccuaccugcagaccgugggccaggacggggaagcccccucggauuaccagagcuucgccgucacaaucgcuagcgcgcucgugaucaccgugaauuuucagaucggccuggacacgagcuacuggaccuucgugaacgccuuuuccaucuuuggauccaucgcccuguacuuugggaucauguucgacuuccacagcgccggcauccacguccucuucccguccgcguuccaguucaccggcaccgccagcaacgcccugcggcagcccuauaucuggcugaccaucauccuggcuguggccgugugucugcugcccgugguagccaucagguuccuguccaugaccaucuggcccucagaguccgauaagauccagaaacacaggaagaggcugaaggccgaggagcaguggcagaggcgccagcaaguguuccgacggggcgugagcacccgcaggagcgcauacgccuucagccaccagaggggguacgccgaucugaucagcagcggucggagcauaaggaagaagaggagcccccuggacgccaucgucgccgaugggaccgccgaguacaggagaaccggcgacucc

SEQ ID NO: 112 - RNA, 3753 nt, Artificial Sequence
  Synthetic Polynucleotide
augagcaccgagcgagacuccgagaccaccuucgacgaggacagccagcccaacgacgagguggugcccuacagcgacgacgagaccgaggacgagcuggacgaccagggcagcgccgucgagcccgagcaaaaccgcgucaacagggaggccgaggagaaucgggagcccuucaggaaagagugcaccuggcaggugaaggccaacgacaggaaguaccacgagcagccccacuucaugaauaccaaguuccugugcauaaaggagucgaaauacgccaauaacgccauaaagaccuacaaauacaacgccuucacguuuauccccaugaaccuguucgaacaguucaagcgcgccgccaaucuguacuuucuggcccugcugauccugcaggccgugccccagaucagcacccucgccugguacacaacccucgugccccuccuggugguccugggcgugacagccaucaaggaccugguggacgacguggccaggcacaagauggacaaggagauuaacaacaggaccugcgaggugaucaaggacggccgcuucaagguggccaaguggaaggagauccaggugggcgaugugaucaggcugaagaagaacgacuucgucccggccgacauccugcugcucuccuccuccgagcccaacucacucugcuacguggagaccgccgagcuugauggggagaccaaccucaaguucaagaugagccuggaaauaaccgaucaguaccugcagagggaagacacgcuggccaccuucgacggguucaucgagugcgaggagcccaacaaccggcuggacaaguucaccggcacccuguucuggaggaacaccucguucccccuggacgcggacaagauccugcugcgcggcugugugauccgaaacaccgacuuuugccauggacuggugaucuucgccggcgccgauaccaagaucaugaagaauuccgguaagaccagauucaagcgcacgaagaucgacuaucugaugaacuauaugguguauaccauauucguggugcugauccugcugagcgccgggcuggccaucggucacgccuauugggaggcccagguggggaacagcagcugguaccuguacgacggcgaggacgacacuccgagcuacaggggcuuccugaucuucuggggcuauaucauagugcuuaacaccaugguccccaucagucuguacguguccguggaagucaucaggcugggccaaagccacuuuaucaacugggaccugcagauguacuacgccgagaaggacacccccgccaaggcccguaccaccacccucaacgagcagcugggccagauccacuauaucuucucagacaagaccggcacgcugacccagaacauaaugaccuucaagaagugcugcaucaacggccagaucuacggggaucaucgggacgcgagccagcauaaccacaauaagaucgaacagguggacuucagcuggaacaccuaugccgauggcaagcucgccuucuacgaccacuaccugaucgagcagauccagagcggcaaagagccggaagugcgccaguucuucuuccugcucgcggugugccauaccguuaugguggauaggaccgacggccagcugaacuaucaggccgccagcccagacgagggcgcgcugguuaacgccgcccggaacuucggcuucgccuuucuggccaggacccagaacacuaucaccaucagcgaacugggcaccgagaggaccuacaacgugcucgccauucucgacuucaacuccgauaggaaaaggaugagcauaaucguaaggacccccgaagggaacaucaagcucuacugcaagggggccgacacagugaucuacgaaaggcugcaccggaugaaccccaccaagcaggagacccaggaugcccuggacaucuucgcuaacgagacccugaggacgcugugccugugcuauaaggagaucgaggagaaggaguucaccgaguggaauaagaaguucauggccgccagcguggcaagcacaaaucgggacgaagcccucgacaagguguacgaggagauugagaaggaccugauccuucucggcgccaccgccauagaggacaagcuucaggacgggguccccgagaccaucagcaaacucgccaaggccgacaucaagaucugggugcugaccggcgacaagaaggagaccgccgagaacauaggguucgccugcgagcugcucacagaggauaccaccaucugcuauggugaagauaucaacagucugcugcaugcccggauggaaaaccagcgaaacaggggcggggucuacgccaaauucgccccccccgugcaggagagcuucuuccccccuggagggaaucgcgcccugaucaucaccggcagcuggcugaacgagauccugcuggagaagaagaccaagcggaacaagauccucaagcugaaguuccccaggaccgaggaggaaaggaggaugcggacccaguccaagcggaggcuggaagccaagaaagagcagaggcagaagaacuuuguggaucuggccugcgagugcagcgccgugaucuguuguagggugaccccuaagcaaaaagcuaugguagucgaccugguuaagcgguacaagaaggccaucacccuggccaucggcgacggcgccaaugacgugaacaugaucaagaccgcccacaucggcgucgggaucuccggucaggagggcaugcaggccgugauguccagcgacuacagcuuugcccaguucagguaccugcagcgucugcugcucgugcauggccgguggagcuauaucaggaugugcaaguuucugagguacuucuucuacaagaacuucgccuuuacccuggugcauuucugguacagcuucuucaacggguacagcgcgcagaccgccuacgaggacugguucauuacccuguacaacgugcuguacacgagccugcccgugcugcugauggggcugcuggaccaggacgugagcgauaagcugucccuccgguucccggggcuguacaucgugggucaacgcgaccuccuguuuaacuacaaaagguucuucgucagccugcugcacggcguccugacgagcaugauccuguuuuucaucccccugggcgcguaccugcagaccgucggacaggauggggaggcccccuccgacuaucagagcuucgccgugacgaucgccagcgcccuggugaucaccgugaacuuccagaucggccuggacaccagcuacuggaccuucgugaacgccuucagcaucuucggcagcaucgcccuguacuucggaaucauguucgacuuccauagcgccggcauccacgugcuguuccccagcgcguuucaguucaccggcaccgccucgaacgcccugcggcagcccuacaucuggcugaccauaauucuggccguggccguuugccugcugcccgugguggccaucagguuucugagcaugacgaucuggccguccgaguccgacaagauacagaagcauaggaagcggcugaaggccgaggagcaguggcagcggaggcagcaggucuuucgccgaggggugagcacccggcggagcgccuacgccuucagccaccagaggggcuacgccgaucugaucagcagcgggaggagcauccgcaaaaaaaggagcccccuggacgccaucguggccgacggcaccgcggaauacaggcgcaccggggacagc

SEQ ID NO: 113 - RNA, 3753 nt, Artificial Sequence
  Synthetic Polynucleotide
augagcacagagagggacagcgaaacaacguuugacgaggacucccagcccaacgacgagguggugcccuacuccgacgacgaaaccgaggacgagcucgacgaccagggcuccgccguggagccagagcagaacagggugaaccgugaggccgaggagaaccgggagcccuucaggaaggagugcaccuggcaagugaaggccaacgacaggaaguaccacgaacagccccacuucaugaacaccaaguuccugugcaucaaggagagcaaauacgccaauaacgccauaaagaccuacaaguauaacgccuucaccuuuauccccaugaaccuguucgagcaguucaagagggcagccaaccuguauuuccucgcccucuugauccugcaggccgugccccagaucagcacccuggccugguacacgacgcuggugccgcuccucguggugcugggcgugaccgccaucaaggaccugguggacgacguggcgcggcacaaaauggauaaggaaaucaacaaccggacgugugaagucaucaaggacggcagguucaaggucgcgaaguggaaggagauccaggugggcgacgugauccgacucaaaaagaacgacuucguaccggccgacauccugcugcucagcuccagcgagcccaacucccuuuguuacgucgagaccgccgagcuggacggcgagaccaaccucaaguucaagaugagccucgaaaucacggaccaguaucugcaacgcgaggacacccucgccaccuucgacggcuucauugagugcgaggaaccgaacaacaggcuggacaaguucaccgggacccuguucuggcgaaauaccuccuucccccuggacgccgacaagauacugcugagggggugcguaauccggaacaccgacuucugccauggccuggugaucuucgccggcgcggacaccaagauaaugaagaacagcgggaagacccguuucaagcggaccaaaaucgacuaccugaugaauuacaugguguacaccaucuuugucgugcucauccuucucuccgccggccuggccaucggccacgccuauugggaggcccagguggggaacagcuccugguaucuguacgacggcgaagacgauacgccgagcuaccgaggcuuccugaucuuuuggggcuacaucauagugcugaauaccaugguacccaucucccucuacguguccguggaggugauccggcugggccagucccacuucaucaauugggaccugcagauguacuacgcugagaaggacacccccgccaaagcccgcaccaccacccugaaugagcagcugggccagauccacuacaucuuuagcgauaagaccggcacacugacccagaacaucaugaccuucaaaaagugcugcaucaacgggcagaucuacggcgaccacagggacgccagccaacacaaccacaacaagauugagcagguggacuucagcuggaauaccuacgccgacgggaagcucgccuucuacgaucacuaccucaucgagcaaauccaguccggcaaggagcccgaggugcgccaauuuuucuuucugcucgccgugugccacaccgucaugguggacaggaccgacgggcagcugaacuaucaggccgccucccccgacgagggcgcccuggugaacgccgcccgcaacuucggauucgccuuccuggccaggacccagaacaccauaacgaucagcgaacugggcaccgagcgcaccuacaacgugcuggccauccuggauuuuaacuccgaccggaagaggaugagcaucaucgugcguacccccgagggaaacaucaagcuguacugcaagggcgccgacaccgugauuuacgagaggcugcaccgcaugaaccccaccaaacaggagacccaggaugcccuggacauauucgcuaacgagacccugcggacccugugucugugcuacaaggaaauagaggagaaagaguucaccgaguggaacaagaaguucauggcggccuccguggcgagcacgaaccgggaugaggcccucgacaaggucuacgaggagaucgagaaagaucugauccuccugggugccacagccauagaggacaagcugcaggacggcgugcccgagaccaucucgaagcuggccaaggccgacaucaagaucuggguccugaccggggacaaaaaggagaccgccgagaacaucgguuucgccugugagcugcugaccgaagauaccaccaucugcuacggcgaggauaucaacucccugcugcacgcgcggauggagaaccagcgcaacaggggcgggguguacgccaaguuugcccccccggugcaagaguccuucuucccgcccgggggcaaccgggcgcugaucaucaccggcagcuggcugaacgagauccugcuggaaaaaaaaaccaagcgcaacaagauccugaagcugaaguuccccaggaccgaggaggagcggagaaugagaacccaguccaagcggcgacuggaggccaagaaggaacagaggcagaagaacuucguggaccuggccugcgagugcuccgccgucauuugcugccgggugaccccuaagcagaaggccauggugguggaccugguaaagcgguacaagaaagccaucacccucgcaaucggcgacggcgccaacgacgugaacaugaucaagaccgcccacaucggcguggggaucagcggccaagagggcaugcaagccgugauguccagcgacuacuccuucgcccaguuucgauaccugcagcggcugcugcuggugcacggccgguggagcuacaucaggaugugcaaguuucugcgguacuucuucuacaaaaacuucgccuucacacuggugcacuucugguauagcuucuucaauggguacagcgcccagaccgccuacgaggacugguucauaacccuguacaacgugcuguacaccagccugcccgugcugcucaugggucugcuggaccaggacgugagcgauaagcugagccugcgguuccccggccuguacaucgugggccagcgcgaucugcuguuuaacuacaaaagguucuucgugagccugcugcacggcguccucaccagcaugauccucuucuucauaccccugggcgccuaccugcagaccgugggacaggauggggaggcccccagcgacuaccagagcuuugccgugaccaucgccagcgcccucgucaucaccgugaacuuccagaucgggcucgauaccucauacuggaccuucgugaacgccuucuccaucuucggcucgaucgcccuguacuuugggaucauguucgacuuccacagcgccggaauccacguccuguuccccagcgccuuucaguucacagguaccgcuagcaaugcgcuccggcagcccuacaucuggcucaccaucauccuggccgucgcagugugucugcuccccgugguggccauccgguuucugagcaugacgaucuggcccuccgagagcgacaagauccagaagcacaggaagaggcucaaggcggaggaacaauggcagcgcaggcagcagguguuccggaggggcgucuccaccagacgcagcgccuaugccuucagccaccagcgaggcuaugccgaucugaucuccaguggcaggagcauccgaaagaagcguuccccacuggaugccaucguggccgacggcacggcggaguacaggaggaccggcgacagc

SEQ ID NO: 114 - RNA, 3753 nt, Artificial Sequence
  Synthetic Polynucleotide
augaguaccgagcgggacucugaaaccaccuucgacgaagauagccagcccaacgacgagguggugccguacagcgacgacgagaccgaggacgaacuggacgaucagggcagcgccguggagcccgagcagaaccgggucaaccgggaagccgaggagaaccgcgagcccuuccggaaggaauguaccuggcaggugaaggccaacgacaggaaguaccaugagcagccccacuucaugaauaccaaauuccugugcauaaaggagagcaaguacgccaacaaugccaucaaaaccuacaaauacaacgccuucaccuuuaucccgaugaaccuguucgaacaguucaaaagagccgcaaaccuguacuuccuggcccugcucauccugcaggccgucccccagaucagcacccuugccugguacacaacccuggucccccugcugguggugcuggggguaaccgccaucaaggaccuggucgacgauguggccaggcacaagauggacaaggagaucaacaacaggaccugcgaggucaucaaggacggccgguucaagguggccaaguggaaggagauccagguuggggacgugauuaggcucaagaagaacgacuuugugcccgccgacauacugcuucugagcuccagcgagcccaacucccugugcuauguggagaccgccgagcuggauggcgagaccaaccugaaguuuaagaugucccuggagaucaccgaccaauaccugcagagggaggauacccuggccaccuucgacggguucaucgagugcgaagagccgaacaacaggcuggacaaguucaccggcacccuguuuuggaggaacaccuccuuuccccuggacgccgacaagauccugcucaggggaugcgucaucaggaacaccgacuucugccacggccuggugaucuucgccggcgccgacaccaagaucaugaagaacuccggcaagacccgcuucaagcgcaccaagaucgacuaccugaugaacuacauggucuacacgaucuucgugguucugauccugcuuuccgcaggacucgccauaggccacgccuacugggaggcccagguggguaacuccagcugguaccuguaugacggcgaagacgacacccccagcuaccgcggcuuccugaucuucuggggcuacaucaucgugcugaacaccaugguucccaucucccuguacguguccgucgaagugauuaggcuggggcagagccacuucaucaacugggaccugcagauguacuaugccgagaaagacacccccgccaaggccaggaccaccacgcugaacgagcaacugggccagauccauuauaucuucagcgacaagaccgggacgcucacccagaauaucaugaccuucaagaaguguugcaucaacgggcagaucuacggcgaccacagggaugccucccagcacaaccauaacaagaucgaacagguggacuucucguggaacaccuacgccgacggcaagcucgcguuuuacgaccauuaccugaucgagcagauccaguccggcaaggagccggaggugaggcaauucuucuuccugcucgccgucugccacaccgugaugguggaccgaaccgacggccaacugaacuaucaggccgccucgccggaugagggcgcccuggugaaugcggcccggaacuucggcuucgccuuccuggcccgaacccaaaacaccaucaccaucagcgaacugggcaccgagcgcaccuauaacgugcuggccauccuggauuuuaacagcgacaggaagaggaugagcaucaucgucaggacccccgaggggaauaucaagcucuauugcaagggggccgacaccgugaucuaugagaggcugcaccgaaugaauccaacgaaacaggagacccaagacgcccuggacaucuucgccaacgaaacccugaggacccugugccugugcuauaaggaaaucgaggagaaagaguucaccgaguggaauaagaaguucauggccgccuccguggccagcaccaauagggacgaggcccuggacaaaguguacgaggagaucgagaaggaccugauccugcugggcgccacggccauugaagauaagcugcaggauggcgugcccgagacaaucuccaagcuggccaaggccgacaucaaaaucuggguguugaccggggauaagaaagagacagccgagaacaucggcuucgccugcgagcugcugacggaggacaccaccaucuguuacggcgaggacaucaacagccugcuccacgccaggauggagaaccagaggaacaggggcggcguguacgccaaauuugccccccccguccaggaguccuucuucccccccggagggaaccgggcccugaucaucaccggcuccuggcuuaacgagauucugcuggagaaaaagacgaagcgcaacaagauucugaagcucaaguucccgcggaccgaggaggagaggcggaugcggacgcagagcaaacggcggcuggaggccaagaaggagcaaaggcagaagaauuucguggaccucgccugcgaaugcagcgccguaauaugcugucgcgucacccccaagcagaaggccauggugguagaccuggugaagagguacaagaaggccaucacccuggccaucggcgacggcgccaacgauguuaacaugaucaagaccgcccacauuggugugggcaucuccggccaagaagguaugcaggccgugaugagcagcgacuauuccuucgcccaguuccgcuaccugcagcgccuguugcugguccacggcaggugguccuauaucaggauguguaaguuucugagguacuucuucuacaagaauuucgccuucacccuggugcacuuuugguacagcuucuucaacggcuacagcgcgcagaccgccuacgaagacugguucaucacccuguacaacgugcuguacaccucccugcccgugcugcucaugggccugcuggaccaggacgugagcgacaagcugagccucagguuucccggccuguacauuguggggcagcgggaccuccuguuuaacuauaaaagguuuuucguaucccugcugcacggcgugcucaccucgaugauccucuucuuuaucccccucggcgccuaccugcagaccgucggccaggacggcgaagcccccagcgacuaccaguccuucgcggugaccaucgccagcgcccucgugaucaccgugaacuuccagaucgggcuggauaccagcuacuggaccuucguaaacgccuucagcaucuucgguucgaucgcgcuguacuucggcaucauguucgacuuucacagcgccggcauccacguccuguuucccagcgccuuccaguucaccgguaccgccagcaacgcacugcgccagcccuauaucugguugaccaucauccuggcgguggccgugugccugcugcccguggucgcaaucagguuccugagcaugaccauauggcccuccgagagcgacaagauacaaaagcacaggaagcgucugaaggccgaagaacaguggcagcgccgucagcagguguucaggcgaggcgugucgacccggcgguccgccuacgccuucagccaccagaggggcuaugccgaucugaucagcagcgggcggagcaucaggaagaagcgcuccccgcuggacgccaucguggccgacgggaccgccgaguaucggaggaccggcgacagc

SEQ ID NO: 115 - RNA, 3753 nt, Artificial Sequence
  Synthetic Polynucleotide
augagcacugagagggauuccgagaccaccuucgacgaggacucccagcccaacgacgagguggugccguacuccgacgacgagacggaggacgagcuggacgaccagggcagcgccgucgagccugaacagaaccgcgucaaucgggaggccgaggagaaccgagagccguuccggaaggagugcaccuggcaggugaaggccaacgaccggaaguaccacgagcagccccacuucaugaauaccaaguuccucugcaucaaggaguccaaguaugcgaacaaugccaucaagaccuacaaguacaacgccuuuaccuucauacccaugaaccucuuugagcaguuuaagagggccgccaaccuguacuuccuugcccugcugauccugcaggcagugccccagaucagcacccucgccugguauaccacccuggugccccuccugguggugcugggcgugaccgccaucaaggaccugguggaugacguggcgaggcacaagauggacaaggagauaaacaaccgcaccugugaggugaucaaggacggacgguucaagguggccaaguggaaagagauccaggugggcgacgucauccggcucaagaagaaugacuucgugcccgcggacauucugcugcuguccuccuccgagccgaacagccuguguuauguugagaccgccgagcuggacggcgagaccaaccugaaguucaagaugagucuggagaucaccgaccaguaccugcagcgugaggacacucucgccacauucgacggauucaucgagugcgaggagcccaacaaucgucucgacaaguucaccggcacccuguucuggcgcaacacgagcuucccccuggacgccgacaagauccuucugagggguugcgugauccgcaacaccgacuucugucacggccuggugaucuucgcuggcgccgacaccaagaucaugaagaacuccggaaagaccagguuuaagcggacgaagaucgacuaccugaugaacuacaugguguacacuaucuuuguggugcugauccugcuguccgccggacuggccauuggccacgccuacugggaagcccaggugggcaacuccagcugguaccuguacgacggcgaggacgacacgcccagcuauaggggcuuccugaucuuuuggggguacauaaucguccugaacaccauggugcccaucagccuguacguguccguggaagucauccgucugggccagucgcacuucaucaacugggaccugcagauguacuacgccgaaaaggauacgcccgccaaggccaggaccacgacccugaaugagcagcuggggcagauccacuacauauucagcgauaaaaccgggacccucacucaaaacaucaugaccuucaaaaaaugcugcaucaacggccagaucuauggcgaccaccgcgacgccagccagcauaaccauaauaagauugaacagguggacuucucguggaauaccuacgccgacggcaaacuggccuuuuaugaccacuaucugaucgaacagauccaaagcggcaaggagcccgaagugaggcaguucuucuuccugcucgccgugugccacaccgugaugguggacaggaccgacggccagcuaaacuaccaggccgccagcccggacgagggcgcccuggugaacgccgcccgcaacuucggcuucgccuuccucgccaggacucagaauaccaucacgaucagcgagcugggcaccgagagaaccuacaacgugcuggccauccuggacuucaacagcgacaggaagaggaugagcauuaucgugaggacaccagaggggaacaucaaacucuacugcaagggcgccgauaccgugaucuacgagaggcugcaccgcaugaaccccaccaagcaggaaacccaggacgcccuggacaucuucgccaacgagacgcucaggacccugugccugugcuacaaagagauagaggaaaaggaguucaccgaguggaacaagaaguucauggccgcgagcguggccucgaccaaccgggacgaggcccuggacaaggucuacgaggaaauugagaaggaccucauacugcucggcgcaaccgcaaucgaagacaagcugcaggacggagugcccgagaccaucagcaaacuggccaaggcagacaucaagaucugggugcugacgggggacaagaaggagaccgccgaaaacaucggcuucgccugcgagcugcugaccgaggauaccacgauuugcuacggcgaagauaucaacagccugcugcacgccaggauggagaaccagcgaaacaggggcggcguguacgccaaguuugccccccccguccaagagagcuucuuuccccccgggggcaacagggcccucaucaucaccggcuccuggcugaacgagauccugcuggagaagaagaccaagaggaacaaaauacugaagcugaaguucccgagaaccgaggaggagaggaggaugcggacccagagcaagaggcggcucgaggccaagaaggagcagaggcagaagaacuucguggaccucgccugugagugcucggccgugaucugcugcagagugacacccaagcagaaggccauggucguggaccuggugaagcgguacaagaaagccauaacccucgccauaggcgauggcgccaacgacgugaacaugaucaagaccgcacacaucggcgugggcauaagcggccaggagggcaugcaggccgucauguccagcgacuauuccuuugcccaguuccgguaucugcagaggcuccuccuggugcacggacgcugguccuacauccgcaugugcaaguuucugagguacuucuucuacaagaacuucgccuucacgcuggugcacuucugguacagcuucuucaacggguauuccgcccagaccgccuacgaggacugguucaucacccuguacaacgugcuguacaccucccugcccgugcugcugauggggcugcuggaccaagacguguccgacaagcugucccugcgauuccccggccuguacaucguggggcagagggaccuccuguucaacuacaagcgguucuuugugagccuguuacacggcgugcugaccagcaugauccuauucuucauuccccugggcgccuaccugcagaccgugggccaggacggagaagcgcccagcgacuaccagucguucgccgugaccaucgccucggcccuggugauuaccgugaacuuucaaaucggccuggacaccagcuacuggacguucgugaacgccuucagcaucuucggcuccaucgcacuguauuucggcauuauguucgauuuccacucugccggcauccacgugcuguuccccagcgccuuccaguucaccggcacggccagcaaugcgcugaggcagccguacaucuggcugaccaucauacuggccguagccgugugccugcuucccgugguggccaucagguuccuguccaugacgaucuggcccagcgagagcgacaagauucagaagcaccggaaaaggcugaaggccgaggagcaguggcagaggaggcagcaaguguuucgaaggggggucagcacccggagguccgcguaugccuucucccaccagaggggguaugcggaccugaucuccagcggccggagcaucaggaagaagaggagcccccucgacgccaucguggcugacggcacagccgaguacaggaggaccggagauucc

SEQ ID NO: 116 - RNA, 3753 nt, Artificial Sequence
  Synthetic Polynucleotide
augagcacggagagggacuccgagacgaccuucgacgaggacucccagcccaacgacgaggucgugcccuacuccgacgacgagaccgaggacgagcuggacgaucaaggcagcgcggucgagcccgagcagaacagggucaaccgagaggcggaggagaacagggagcccuuccggaaagagugcaccuggcaggugaaggccaacgaccggaaguaccaugaacagccccauuucaugaacaccaaguuucugugcauaaaagagagcaaauacgcaaacaacgccaucaagacauacaaguacaacgccuucaccuucauccccaugaaccuguucgagcaguucaagcgggccgccaaccucuacuuccuggcccugcugauccuccaggccgugccccaaaucagcacccucgcgugguacaccacccugguaccccugcuggucgugcucggagugaccgccaucaaggaccugguggacgacgucgcccgccacaagauggacaaggagaucaacaaccggaccugcgaagugauaaaggacggaagguucaaggucgccaaguggaaagagauacagguaggggaugugauucgacugaaaaagaacgacuucgugccugccgacauccugcugcugagcagcucggagcccaauagccucugcuacguggagacugccgagcuggacggcgaaaccaaccugaaguucaagaugucccuggagaucaccgaucaguaccugcagcgcgaggacacccuggccaccuuugauggguucauagaaugcgaggagcccaacaacaggcuggacaaauucaccgguacccuguucuggaggaacacauccuucccccuggacgccgacaagauccugcugcgggguugugugaucaggaacaccgacuucugccacgggcucgucaucuucgccggggcggacacuaagauuaugaagaauagcgggaagacccgguucaagaggaccaagaucgacuaccugaugaacuacaugguguacaccaucuuugugguccugauccugcuguccgccgggcuggccaucggccacgccuacugggaagcccaagugggcaacagcagcugguaucucuacgacggcgaggacgauacccccagcuaucgaggcuuucugaucuuuuggggguacauuaucgugcugaauaccauggugcccaucagccucuacgugagcguggaggugauccggcugggacagagccauuuuaucaacugggaccugcaaauguacuacgccgagaaagacacgcccgccaaggccagaaccaccacccugaaugagcagcugggccagauccacuacaucuuuuccgacaagaccggcacccugacccagaacaucaugaccuucaaaaaaugcugcauaaacggccaaaucuacggcgaucacagggaugccucccagcacaaucacaacaagaucgagcagguggauuucuccuggaacaccuacgccgacggcaagcuggccuuuuacgaccacuaccugauugaacagauccagagcgggaaggaacccgaggugcggcaguucuucuuccugcuggccgucugccauacggugaugguggacaggaccgacggccagcugaacuaccaggccgccagccccgacgagggcgcccuggucaaugccgcccggaauuucggcuucgccuuccuggcccgaacccagaacaccaucaccaucagcgagcuaggcaccgagaggaccuacaacgugcucgccauccuggacuucaacuccgauaggaagaggaugagcaucaucgugaggacgccggaggggaacaucaagcucuacuguaagggcgccgacaccgugaucuacgagaggcugcacaggaugaaccccacaaaacaggagacccaagaugcccuggacaucuucgccaacgagacucugcggacccugugccugugcuacaaggagaucgaggagaaggaguucaccgaguggaacaagaaguucauggcggccagcguggccucuaccaaccgggacgaggcacuggauaaaguguacgaagagaucgagaaagaucugauccugcugggcgccacggccaucgaggacaaacugcaggacggugucccggagaccaucuccaaauuggccaaagccgacaucaagaucugggugcugaccggagauaaaaaagagacagccgaaaacauaggguuugccugcgagcugcugaccgaggauaccaccaucugcuacggggaggacaucaacucccuccugcacgcccggauggagaaccagcgcaaccggggcggcguguacgccaaguucgccccucccgugcaagagagcuucuucccgccaggaggcaaccgugcccucaucauaaccggcagcuggcuuaacgagauacugcuggagaagaagaccaagcgcaacaaaauccucaaacugaaauucccccggacagaggaggagcgaaggaugcggacgcaguccaagaggcgguuagaggccaagaaggagcagaggcagaagaacuucguggaucuggccugcgagugcuccgccgugauaugcugccgggugacccccaaacaaaaagcgauggugguggaccuggugaaaagauauaagaaagcgaucacccuggccaucggggacggcgcgaacgacgugaacaugauuaaaaccgcccacaucggggugggcaucuccggccaggaggggaugcaggccgugauguccuccgacuacuccuuugcccaguuccgguacuugcagaggcugcugcuggugcacgggagguggagcuacaucaggaugugcaaguuccugcgcuacuucuucuacaaaaacuuugccuucacucuugugcauuuuugguauagcuuuuucaacggguacagcgcccagaccgccuacgaggacugguucaucacccuguacaacgugcuguacaccucccuccccguccuucugaugggccugcuggaccaagacgugagcgacaaacugucgcugcguuuucccggccuguacauugugggccagcgggaccugcucuuuaacuacaagcgcuucuucgugucccugcugcacgggguccugaccagcaugauacuguucuucauuccccugggggccuaccugcagaccguaggacaggacggcgaggcgcccuccgauuaccagagcuucgccgugaccaucgccagcgcccuggucauaaccgugaauuuucaaaucggccucgacaccagcuauuggaccuucgucaacgccuuuagcaucuuuggguccaucgcgcuuuacuucggcaucauguucgacuuccacagcgccggcauccacgugcucuuccccagcgccuuccaguucaccggcaccgccagcaacgcccuccggcagcccuauaucuggcugaccaucauccucgccguggccgugugccugcugcccgugguggccauaagguuccugagcaugaccaucuggccuagcgaguccgacaaaauccagaagcaucgcaagcggcugaaggccgaggagcaguggcaacggagacagcagguguucaggaggggggugucaacccggcggagcgccuaugccuucagccaccagaggggguacgccgaccucaucagcagugguaggagcaucaggaaaaagagguccccccucgacgccaucgucgccgauggcaccgccgaguauaggaggaccggcgacucc

SEQ ID NO: 117 - RNA, 3753 nt, Artificial Sequence
  Synthetic Polynucleotide
augucgaccgagagggacagcgagaccacuuucgacgaggacucccaacccaacgacgaggugguccccuacagcgacgacgagaccgaagacgaacuggacgaccagggcuccgccguggagcccgagcagaacagggugaaccgcgaggcggaagagaacagggagcccuucaggaaagagugcaccuggcaagugaaggccaaugaccgaaaguaccacgagcagccccauuucaugaauaccaaauuccugugcaucaaggaguccaaguacgccaacaacgccauaaaaaccuacaaguacaacgccuucaccuucauccccaugaaccuguucgagcaguuuaagcgggccgccaaccuguacuuccuggcccugcugauccuccaggccgugccccagaucuccacccuggcgugguacaccacccuggugccccugcuggugguccugggcgugaccgccaucaaggaccugguggacgacguggcccgacacaagauggauaaggagaucaacaaccgaaccugcgaggugaucaaggauggccgguucaagguggcuaaguggaaagagauccaggugggggacgugauccggcucaagaagaaugacuucguccccgccgacauccuucugcugagcagcagcgagccgaauagccugugcuacguggagaccgccgagcuugacggcgagaccaaccucaaauucaagaugucccuggagaucaccgaccaguaucugcagcgcgaggauacccuggccaccuucgauggcuucaucgagugcgaggagcccaacaacaggcuggacaaguucaccggcacucuguucuggaggaacaccuccuuuccccuggacgccgauaagauccugcugcgggggugcgugaucaggaauacagauuuuugccacggccuggugaucuucgccggcgccgacaccaagaucaugaaaaacagcggcaagacccguuucaagcggaccaagaucgacuaccugaugaacuacauggucuacaccaucuucguugugcugauccugcugagcgccgggcuggccaucgggcaugccuauugggaggcccaggugggcaacagcagcugguaccuguaugacggggaggaugauacgcccuccuaccgcggcuuccugaucuucuggggauacaucaucguucugaacaccaugguccccaucucgcuguacgugagcguggaggugauccggcuggggcagucccacuucaucaacugggaccugcagauguacuacgccgagaaggacacccccgcgaaggcccgcaccacgacgcugaaugagcagcugggccagauccacuacauuuucagcgauaagaccggaacgcuaacccagaacaucaugaccuucaagaagugcuguaucaacgggcagaucuacggcgaccaccgggacgccucacagcacaaccacaauaagaucgagcaggucgacuucuccuggaauaccuacgccgacgggaagcuggcguucuacgaccacuaucuaaucgaacaaauccagagcggcaaggagcccgagguccggcaguuuuucuuccugcucgccgugugucauaccgugaugguggauaggaccgauggucagcugaacuaccaggccgccagccccgaugagggcgcccuggugaaugcggcgcgcaacuucggguucgccuucuuagcccggacccagaacaccaucaccaucucagagcuggggaccgagaggaccuauaaugugcuggccauccucgacuuuaauuccgaucggaagcguaugagcauaauugugcguacacccgagggaaacaucaagcuguauugcaaaggcgcugacacggucaucuacgagcgacugcaccggaugaaccccaccaaacaggagacgcaggacgcccuggacaucuucgccaacgaaacccucaggacccugugccucugcuacaaagaaaucgaagaaaaggaguucacugaguggaauaagaaguucauggcggccagcguggccagcaccaaccgggacgaagcacuggacaagguguacgaggagaucgagaaggacuugauccugcugggcgccacggccaucgaggacaagcugcaagacggggugcccgaaaccaucagcaagcuggccaaggccgauaucaagauaugggugcugaccggcgacaagaaggagaccgccgagaacaucggcuucgccugcgagcugcucaccgaggauacgaccaucugcuacggcgaggacaucaacagccugcugcacgcucgaauggagaaccagcgaaauagggggggcgucuacgccaaguuugccccccccgugcaagagucguucuucccccccgguggcaacagggcccugauaaucaccggcuccuggcugaacgagauccugcuggagaagaagaccaagcgcaacaagauccugaagcugaaguuuccgcguaccgaggaagagcgcaggaugcgcacccaaucaaagaggaggcucgaggccaagaaggagcagcggcagaagaauuuuguggaucuggccugcgaguguuccgcugugaucugcugccgggugacccccaaacagaaagccauggucguggaccuggugaagagguacaagaaagcgaucacgcuggccaucggugauggggccaacgacgugaacaugaucaagaccgcccacaucggcgugggcaucuccgggcaggagggcaugcaggccgucauguccagcgacuacucauucgcccaguuccgauaccugcagcgccuccugcuggugcacggcagguggagcuacauccggaugugcaaauuccugagguacuucuucuacaaaaacuucgccuucacccucgugcauuucugguacagcuucuucaauggcuauuccgcccagacugccuacgaagacugguucaucacucucuacaacguccuguacaccagccugcccguccugcugaugggacugcuggaucaggauguguccgacaagcugagccucagguuccccggccuguauaucgugggccagcgcgaccugcuguucaacuacaagagguucuucgugagccugcugcacggcgugcugacuagcaugauccuguucuucaucccccugggggccuaccugcagacagugggccaggacggggaggcccccagcgacuaucagucuuucgccguaaccauagccuccgcgcuggugaucaccgugaacuuccagaucggccuggacaccuccuacuggaccuuugugaacgcuuuuagcaucuuuggcagcauugcccuguacuuuggcaucauguuugacuuucacagcgccgggauucaugugcuguuccccagcgccuuucaguucacgggcaccgccagcaacgcccugcggcagcccuauaucuggcugaccaucauccuggccguggccgucugccugcugcccgugguggccauccgguuccucagcaugaccaucuggcccuccgagagcgauaaaauccagaaacaucgaaagcggcugaaggccgaggagcaguggcaaaggcggcagcagguguuccggaggggggucagcacccgccgguccgccuacgccuuuucccaucaaaggggguacgccgaucugaucuccuccgggcggagcaucaggaagaagagguccccgcuggacgccaucguggccgacggcaccgccgaguaccggaggaccggagacagc

SEQ ID NO: 118 - RNA, 4024 nt, Artificial Sequence; identical to SEQ ID NO: 41
  Synthetic Polynucleotide

SEQ ID NO: 119 - protein, 1286 aa, Artificial Sequence; identical to SEQ ID NO: 1
  Synthetic Polypeptide

SEQ ID NO: 120 - RNA, 4048 nt, Artificial Sequence; identical to SEQ ID NO: 44
  Synthetic Polynucleotide

SEQ ID NO: 121 - protein, 1294 aa, Artificial Sequence; identical to SEQ ID NO: 46
  Synthetic Polypeptide

SEQ ID NO: 122 - RNA, 4027 nt, Artificial Sequence; identical to SEQ ID NO: 47
  Synthetic Polynucleotide

SEQ ID NO: 123 - protein, 1287 aa, Artificial Sequence; identical to SEQ ID NO: 49
  Synthetic Polypeptide

SEQ ID NO: 124 - RNA, 4018 nt, Artificial Sequence; identical to SEQ ID NO: 50
  Synthetic Polynucleotide

SEQ ID NO: 125 - protein, 1284 aa, Artificial Sequence; identical to SEQ ID NO: 52
  Synthetic Polypeptide

SEQ ID NO: 126 - RNA, 4026 nt, Artificial Sequence
  Synthetic Polynucleotide
gggaaauaagagagaaaagaagaguaagaagaaauauaagagccaccauggauuuagaagccgccaagaacggaaccgccuggcgucccaccagcgccgagggcgauuucgaacuuggcaucucaagcaaacaaaagaggaaaaaaacaaagaccgugaagaugauaggcguucucacccuguucagguacagcgauuggcaggauaagcuguucaugucccuggguacaauuauggccaucgcccauggcuccggccugccgcugaugaugaucguuuuuggagagaugaccgacaaauuuguggauaccgccgggaacuucucauucccugugaacuucagccugagccugcugaacccuggcaagauccuggaggaagagaugaccagauacgccuacuacuacucuggccugggugcgggaguccugguugccgcuuacauucaggugagcuuuuggacccuggccgccggcagacagauccguaaaaucaggcaaaaguucuuccacgccauccucagacaggaaaucggcugguucgacaucaaugacaccaccgagcugaacacaaggcugacagacgauaucucuaagaucucagaaggcaucggagauaaggugggcauguucuuccaggccgucgccaccuuuuucgccggcuucaucgugggcuucauccgcggauggaaacugacccuugugaucauggccaucagcccaauccugggccugagcgccgccgugugggccaagauccugucugcuuuuagcgacaaggagcuggccgcguacgcuaaggccggcgccguggccgaggaggcucugggcgccaucagaaccgugaucgcuuuugggggacaaaacaaggagcuggaacgguaccagaagcaccuggagaacgcuaaggagaucgggaucaagaaggccaucuccgcuaauaucagcauggggaucgccuucuuacugauauacgcuagcuacgcccuggccuuuugguacggcagcacccuggugauuuccaaggaguacaccauuggcaacgccaugaccguguucuucucuauccucaucggugcuuuuuccguuggccaggccgcccccugcaucgacgccuucgccaacgcuagaggcgccgccuacgucaucuucgauaucaucgacaacaauccaaagauugacagcuucagcgagcggggccauaagccagacucaaucaaggggaaccuugaauucaaugacguccauuucuccuaccccucucgagccaaugugaagauacugaaggggcugaaccugaaggugcaguccggucagaccguugcccuggugggcagcuccggaugugggaagucuaccaccguacaguugauccagcgacuguacgacccagacgaaggcaccaucaacauugauggccaggacauccggaauuuuaaugugaacuaccugagagagauuaucggcguggucucccaggaacccguccuguucuccacaacuaucgccgagaacaucuguuacggaagaggaaacgugaccauggacgagauaaagaaggccgucaaagaggcaaaugccuacgaguucauuaugaagcugccucagaaguucgacacccuggucggcgagagaggggcccagcugucugggggccagaagcagagaaucgccaucgccagggcucucguccggaaccccaagauucuccuccuggaugaggccaccagcgcccuggacaccgaaagcgaagccgagguccaggccgcccuggacaaggcccgagagggcaggaccaccaucgugaucgcccauagguugagcaccgugaggaaugccgacgugaucgcuggauucgaggacggcguuaucguggagcagggcucucacucggagcugaugaaaaaagagggcguguacuucaaacucgugaacaugcagacuuccggaucacagauccaguccgaggaguucgagcucaacgaugagaaggcugccacuagaauggcaccaaacggcuggaagucccgucuuuucagacacucuacgcagaagaaucugaagaacagccagaugugccagaagucucuggacguggaaacggacggccuggaagccaacgucccucccguguccuuccugaaaguccugaagcuaaacaaaacagaguggccuuacuuuguggugggcacuguuugcgccaucgccaacggcggccugcagccugcguucagcgugaucuuuagcgagauuauagcuauuuuuggcccuggagacgaugcugugaagcaacagaagugcaacaucuuuagucuuaucuuccuuuuccucggaaucaucagcuuuuucacguucuuccuucaggguuuuaccuuuggcaaggccggagagauacucacuagacgccugagaucaauggcuuuuaaggccaugcugagacaggacaugagcugguucgacgaccacaagaauucuaccggagcacuguccacaagacuggcaaccgacgccgcccagguccagggggccacuggcacccggcuggcccugaucgcucaaaacauugcaaaccugggaacuggcaucaucauuagcuucaucuauggauggcagcugacacuucugcugcuggccgucgugccaauuaucgccgugagcgggaucgucgagaugaaacuccucgcugggaaugcuaagagggacaagaaggagcuggaggccgcgggcaagaucgccacugaggcuaucgagaauauccgcaccguugugagcuugacacaggagagaaaguucgagagcauguauguggagaagcuguacggaccauacagaaauucagugcagaaggcccacaucuacggaauuaccuucuccaucagccaggcauucauguacuuuucuuacgccggcuguuuuagauucggcgcauaccugaucgugaacggccauaugagguucagagacgugauccugguuuucuccgccauaguguuuggcgcugucgcucugggccacgccagcucauuugcucccgauuaugcaaaggcaaagcuguccgccgcacaccucuucaugcucuucgagcgucagccucugaucgacuccuacucagaggaggggcucaagcccgacaaguucgaaggcaacaucacuuucaacgaagugguguucaacuacccuacccgggcaaacgugccugugcugcagggccugagccuggaggugaagaaaggacagacccuggcucugguaggcucauccggaugcggcaaaucaacaguggugcaacugcucgagcgguucuacgacccccuggcggggaccguucuccuggauggccaggaggcaaagaagcugaacgugcaguggcugagagcacagcuggggauugugucccaggaaccgauucuguuugacugcagcaucgccgagaacaucgccuacggagauaacagcaggguggugagccaggaugagaucgugagcgccgcaaaagccgccaacauccaccccuucauugagacccugccacacaaguacgagaccagagugggcgacaagggcacccagcugucaggaggacagaagcagcguaucgccaucgccagagcccugauucggcagccccagauucugcugcuggacgaggcuacaagcgcucuggacaccgaguccgaaaagguggugcaggaggcacuugacaaggccagagagggcagaaccugcauagugauugcccacagacugagcaccauucaaaacgccgaccugaucgugguuuuccagaaugggcggguuaaggagcauggcacccaccagcaacugcuggcccagaagggcaucuauuucagcauggugagcgugcaggccggcacacagaaucugugauaauaggcuggagccucgguggccaugcuucuugccccuugggccuccccccagccccuccuccccuuccugcacccguacccccuccauaaaguaggaaacacuacaguggucuuugaauaaagucugagugggcggc

SEQ ID NO: 127 - protein, 1279 aa, Artificial Sequence; identical to SEQ ID NO: 3
  Synthetic Polypeptide

SEQ ID NO: 128 - RNA, 4026 nt, Artificial Sequence
  Synthetic Polynucleotide
gggaaauaagagagaaaagaagaguaagaagaaauauaagagccaccauggaccuagaggcugccaagaacgggaccgccuggaggcccacaagcgcagaaggggacuuugaacugggcaucagcuccaagcagaaaagaaagaagacaaaaacagucaagaugaucggcgugcugacacuguucagauacagcgacuggcaggacaaacuguucaugagccugggcaccaucauggccaucgcgcaugguagcggccucccucugaugaugaucguauucggcgaaaugaccgauaaguucguugacacugccgggaacuucagcuuucccgucaacuuuagccugagccuguugaaccccggcaagauccuggaggaggagaugaccagguaugccuauuauuauagcggacugggcgcaggggugcugguggcggccuacauacaggugucuuuuuggacucuggccgccggcagacagauccggaaaauccggcagaaguucuuccaugcuauccuuaggcaggagauuggcugguucgacaucaacgauacuacugagcucaacacacgacuuaccgacgacaucagcaagauuuccgagggcaucggcgauaaggugggcauguucuuccaagccguugccacauuuuucgcaggguucaucguuggcuucauuagaggcuggaagcucacacuggucaucauggcaaucagccccauccuggggcugagcgccgccgugugggcaaagauccucagcgcuuucagugacaaggagcuggcugccuacgcgaaggccggcgccguggcugaggaggcgcugggcgccauacgaaccgugaucgccuucggaggucaaaacaaggagcucgagagauaucagaaacaccuggagaacgccaaagagauuggaaucaagaaagcuaucucugccaacauuagcaugggcaucgccuuccuucugauauacgccagcuacgcacuggccuuuugguacggcucuacacuggugaucuccaaggaauacaccaucggaaaugccaugaccguguucuuuagcauccugaucggcgccuucagcguggggcaggccgcucccuguaucgacgcguuugccaacgcuagaggcgccgccuacgucaucuuugacaucaucgacaauaacccuaagauugacucuuuuagcgaaagaggccacaagccagauagcaucaagggcaaccuugaguucaaugacguccacuucuccuaucccagccgggccaaugugaagauucugaagggacugaaccugaagguacagagcggccagacuguggcccuggucggcagcuccggaugcggaaagucuaccacaguccagcugauccagaggcucuacgauccagacgagggaacgaucaacaucgauggccaggauauccggaacuucaacgugaauuaucucagagagaucaucggcguggugucccaagagcccgugcucuucagcacaaccauugccgaaaacauaugcuacggcaggggcaacguuacaauggacgagaucaagaaggcggugaaggaggccaaugcuuaugaauucauuaugaagcugccccagaaguuugacacccuggugggcgagagaggcgcccagcuuuccggcggccagaagcagagaauugccaucgccagagcacugguuagaaaccccaagauccugcugcuggacgaggccaccuccgcccuggacaccgagagcgaggccgagguccaggccgccuuggacaaagccagagagggcagaaccaccaucgugaucgcacaccgccuguccaccgugaggaaugccgacgugaucgccggauucgaagacggcgugaucguggagcagggaagccacagcgagcugaugaagaaggagggagucuacuuuaaacucgugaauaugcagacgagcgggagccagauccagagcgaggaguucgaacugaacgaugagaaggccgcaacgagaauggcacccaacggcuggaagagcaggcuguucagacacagcacgcagaaaaaucuaaaaaacucccagaugugccagaagucccucgacguggaaaccgauggccuggaggccaacgugccccccgucaguuuccugaaagugcugaagcucaacaagaccgaguggcccuacuucgucguggggaccgugugugccauugccaauggcgguuugcagcccgcguucagcgugauuuuuagcgaaauuaucgccauuuuuggccccggcgacgacgccgugaaacagcagaagugcaacauuuucagucucaucuuucucuuucugggcaucaucucuuucuuuaccuuuuuccugcagggauucacguuuggcaaggcuggcgagauucugacaagacgccuccggagcauggccuucaaggccaugcucagacaggacauguccugguucgacgaucacaagaacucaaccggggcucugagcaccagguuagcuaccgaugcggcucagguccagggcgccaccggcacucgccucgcccugaucgcccagaacaucgcuaaccugggaacaggcaucaucaucucauuuaucuacggcuggcagcugacccugcuccuucuggccguugugcccauaauugccgugagcggcauaguggagaugaagcuccuggcugggaacgcaaagcgggauaagaaggagcuggaggccgcuggaaagaucgcuacagaagcaaucgagaacaucagaaccguggugucccugacacaagagcggaaguucgaguccauguacguggagaaacuguacggaccuuacagaaacuccguccagaaggcccauauauauggaaucaccuuuaguauuagccaggccuucauguacuucuccuacgcuggcugcuuucgguucggugccuaccugauagugaauggacacaugcgguucagggaugucaucuugguguucuccgccaucgucuuuggcgccguggcccugggccacgcuuccagcuuugccccugauuacgccaaggccaagcugagcgccgcccaccuguuuaugcucuucgaaaggcagccgcugauagauagcuacucugaagagggcuugaagcccgacaaguucgagggcaacauaaccuuuaacgaagucguguucaacuacccuaccagagccaacgucccagugcuucagggccugagcuuggaggugaagaaaggacagacccuugccuuagugggcucuaguggcugcgggaagagcacugugguccagcucuuggagagauucuacgaccccuuagcaggcaccguccuucuggauggacaggaggccaaaaaacucaacgugcaguggcugagagcacagcugggcauugugagccaggaacccauccuguuugacuguuccaucgccgagaauauugcauacggcgacaacagcaggguggugagccaggaugagaucguguccgcagcgaaagcagccaacauacaccccuucaucgagacacugccucacaaguacgagaccagggugggcgauaagggcacacagcugucuggcggccagaagcagcguauugccaucgccagagcccugauuagacagccacagauccugcugcuggaugaagcuaccucugcacuugacaccgaguccgagaaggucgugcaggaggcccuggauaaggcgagagaaggccgcacuugcauagugaucgcgcacagacucagcacaauccaaaacgccgaccuuaucguugucuuccaaaacgggagggugaaggagcauggcacucaccaacagcugcuugcccagaaggggauauacuucuccaugguauccguacaggcuggcacccagaaucugugauaauaggcuggagccucgguggccaugcuucuugccccuugggccuccccccagccccuccuccccuuccugcacccguacccccuccauaaaguaggaaacacuacaguggucuuugaauaaagucugagugggcggc

SEQ ID NO: 129 - protein, 1279 aa, Artificial Sequence; identical to SEQ ID NO: 3
  Synthetic Polypeptide

SEQ ID NO: 130 - RNA, 4050 nt, Artificial Sequence
  Synthetic Polynucleotide
gggaaauaagagagaaaagaagaguaagaagaaauauaagagccaccauggauuuagaagccgccaagaacggaaccgccuggcgucccaccagcgccgagggcgauuucgaacuuggcaucucaagcaaacaaaagaggaaaaaaacaaagaccgugaagaugauaggcguucucacccuguucagguacagcgauuggcaggauaagcuguucaugucccuggguacaauuauggccaucgcccauggcuccggccugccgcugaugaugaucguuuuuggagagaugaccgacaaauuuguggauaccgccgggaacuucucauucccugugaacuucagccugagccugcugaacccuggcaagauccuggaggaagagaugaccagauacgccuacuacuacucuggccugggugcgggaguccugguugccgcuuacauucaggugagcuuuuggacccuggccgccggcagacagauccguaaaaucaggcaaaaguucuuccacgccauccucagacaggaaaucggcugguucgacaucaaugacaccaccgagcugaacacaaggcugacagacgauaucucuaagaucucagaaggcaucggagauaaggugggcauguucuuccaggccgucgccaccuuuuucgccggcuucaucgugggcuucauccgcggauggaaacugacccuugugaucauggccaucagcccaauccugggccugagcgccgccgugugggccaagauccugucugcuuuuagcgacaaggagcuggccgcguacgcuaaggccggcgccguggccgaggaggcucugggcgccaucagaaccgugaucgcuuuugggggacaaaacaaggagcuggaacgguaccagaagcaccuggagaacgcuaaggagaucgggaucaagaaggccaucuccgcuaauaucagcauggggaucgccuucuuacugauauacgcuagcuacgcccuggccuuuugguacggcagcacccuggugauuuccaaggaguacaccauuggcaacgccaugaccguguucuucucuauccucaucggugcuuuuuccguuggccaggccgcccccugcaucgacgccuucgccaacgcuagaggcgccgccuacgucaucuucgauaucaucgacaacaauccaaagauugacagcuucagcgagcggggccauaagccagacucaaucaaggggaaccuugaauucaaugacguccauuucuccuaccccucucgagccaaugugaagauacugaaggggcugaaccugaaggugcaguccggucagaccguugcccuggugggcagcuccggaugugggaagucuaccaccguacaguugauccagcgacuguacgacccagacgaaggcaccaucaacauugauggccaggacauccggaauuuuaaugugaacuaccugagagagauuaucggcguggucucccaggaacccguccuguucuccacaacuaucgccgagaacaucuguuacggaagaggaaacgugaccauggacgagauaaagaaggccgucaaagaggcaaaugccuacgaguucauuaugaagcugccucagaaguucgacacccuggucggcgagagaggggcccagcugucugggggccagaagcagagaaucgccaucgccagggcucucguccggaaccccaagauucuccuccuggaugaggccaccagcgcccuggacaccgaaagcgaagccgagguccaggccgcccuggacaaggcccgagagggcaggaccaccaucgugaucgcccauagguugagcaccgugaggaaugccgacgugaucgcuggauucgaggacggcguuaucguggagcagggcucucacucggagcugaugaaaaaagagggcguguacuucaaacucgugaacaugcagacuuccggaucacagauccaguccgaggaguucgagcucaacgaugagaaggcugccacuagaauggcaccaaacggcuggaagucccgucuuuucagacacucuacgcagaagaaucugaagaacagccagaugugccagaagucucuggacguggaaacggacggccuggaagccaacgucccucccguguccuuccugaaaguccugaagcuaaacaaaacagaguggccuuacuuuguggugggcacuguuugcgccaucgccaacggcggccugcagccugcguucagcgugaucuuuagcgagauuauagcuauuuuuggcccuggagacgaugcugugaagcaacagaagugcaacaucuuuagucuuaucuuccuuuuccucggaaucaucagcuuuuucacguucuuccuucaggguuuuaccuuuggcaaggccggagagauacucacuagacgccugagaucaauggcuuuuaaggccaugcugagacaggacaugagcugguucgacgaccacaagaauucuaccggagcacuguccacaagacuggcaaccgacgccgcccagguccagggggccacuggcacccggcuggcccugaucgcucaaaacauugcaaaccugggaacuggcaucaucauuagcuucaucuauggauggcagcugacacuucugcugcuggccgucgugccaauuaucgccgugagcgggaucgucgagaugaaacuccucgcugggaaugcuaagagggacaagaaggagcuggaggccgcgggcaagaucgccacugaggcuaucgagaauauccgcaccguugugagcuugacacaggagagaaaguucgagagcauguauguggagaagcuguacggaccauacagaaauucagugcagaaggcccacaucuacggaauuaccuucuccaucagccaggcauucauguacuuuucuuacgccggcuguuuuagauucggcgcauaccugaucgugaacggccauaugagguucagagacgugauccugguuuucuccgccauaguguuuggcgcugucgcucugggccacgccagcucauuugcucccgauuaugcaaaggcaaagcuguccgccgcacaccucuucaugcucuucgagcgucagccucugaucgacuccuacucagaggaggggcucaagcccgacaaguucgaaggcaacaucacuuucaacgaagugguguucaacuacccuacccgggcaaacgugccugugcugcagggccugagccuggaggugaagaaaggacagacccuggcucugguaggcucauccggaugcggcaaaucaacaguggugcaacugcucgagcgguucuacgacccccuggcggggaccguucuccuggauggccaggaggcaaagaagcugaacgugcaguggcugagagcacagcuggggauugugucccaggaaccgauucuguuugacugcagcaucgccgagaacaucgccuacggagauaacagcaggguggugagccaggaugagaucgugagcgccgcaaaagccgccaacauccaccccuucauugagacccugccacacaaguacgagaccagagugggcgacaagggcacccagcugucaggaggacagaagcagcguaucgccaucgccagagcccugauucggcagccccagauucugcugcuggacgaggcuacaagcgcucuggacaccgaguccgaaaagguggugcaggaggcacuugacaaggccagagagggcagaaccugcauagugauugcccacagacugagcaccauucaaaacgccgaccugaucgugguuuuccagaaugggcggguuaaggagcauggcacccaccagcaacugcuggcccagaagggcaucuauuucagcauggugagcgugcaggccggcacacagaaucuggacuacaaggacgacgacgacaagugauaauaggcuggagccucgguggccaugcuucuugccccuugggccuccccccagccccuccuccccuuccugcacccguacccccuccauaaaguaggaaacacuacaguggucuuugaauaaagucugagugggcggc

SEQ ID NO: 131 - protein, 1287 aa, Artificial Sequence; identical to SEQ ID NO: 49
  Synthetic Polypeptide

SEQ ID NO: 132 - RNA, 4026 nt, Artificial Sequence
  Synthetic Polynucleotide
gggaaauaagagagaaaagaagaguaagaagaaauauaagagccaccauggaccuggaggcagccaagaacggcaccgcuuggaggccgacaucagccgagggagacuucgaacugggaaucuccaguaaacaaaagagaaagaagaccaagacagugaaaaugaucggagugcugacacuguucagguacuccgacuggcaggacaagcucuuuaugucccucggcaccaucauggccauugcucacggcagcggccugccuuuaaugaugaucguuuucggggagaugaccgacaaauucguggauacagccggaaacuucucguuccccgugaacuuuagccugagccugcugaauccugggaaaauccuggaggaggaaaugaccagguacgccuacuacuacagcggccugggggcuggcgugcugguggccgccuacauccagguguccuucuggacucuggccgccggcagacagaucaggaagaucagacagaaguucuuccacgcuauucugaggcaggaaauugggugguucgacaucaacgacacuaccgagcuuaacacgagacugaccgacgacauuagcaagaucucugaaggcaucggugauaaggugggcauguucuuccaagccguggccaccuuuuucgcaggguucaucgugggauuuauccggggcuggaagcuuacccuggucaucauggcuaucagcccgauucugggccucagcgccgcaguuugggccaagauccuguccgcuuucuccgacaaggagcucgccgccuacgccaaggcuggugcaguggcugaggaggcccuuggagccauucguaccgugaucgccuuuggcggccagaacaaagagcuagagagauaccaaaaacacuuggagaacgccaaggagaucggcauuaagaaggccaucucugccaacauuuccauggggaucgccuuccugcugaucuacgccagcuacgcccuggcuuuuugguacggcaguacgcuggugauuagcaaggaguacaccaucggcaacgccaugaccguguuuuucuccauucucaucggagcauucuccgugggccaggcugcccccugcaucgacgcguucgccaaugccagaggcgccgccuaugugauuuucgacaucaucgacaauaacccaaagaucgacaguuucucugaacguggacacaaaccagacagcaucaaaggaaaucuggaguucaacgacgugcacuucagcuacccauccagggccaacgugaagauucugaagggcuuaaaccugaaggugcagaguggacagaccguggcccugguggggucuucuggcugcggcaagagcaccaccgugcagcucauucagagacuuuaugaccccgaugagggcacuauaaacaucgauggccaggacaucaggaacuucaaugugaacuacuuaagggaaauuaucggcguggugagccaggagcccgugcuguucucuaccacgauugcagagaauaucugcuacgggagaggcaacgugaccauggacgaaaucaaaaaagcuguaaaagaggcuaacgcuuacgaguucauuaugaaacuaccccagaaguucgauacccucgugggggagaggggugcacagcugagcgguggccagaagcagaggaucgccauagcaagagcccuggugagaaaccccaaaauccuccuuuuggaugaggccaccuccgcccucgacaccgagagcgaagccgaggugcaggccgcccucgacaaggccagggagggccgcaccaccauugugaucgcccacaggcugagcaccgugagaaacgccgacgugauugccggauucgaggacggcgugaucguggagcagggcagccacagcgagcucaugaaaaaggaaggcgucuacuucaaacuggugaauaugcagaccucggguagccaaauccaguccgaggaguuugaguuaaacgacgagaaggccgccacccggauggcccccaauggguggaagagccgccuguuuaggcacucaacccaaaagaaccugaagaacucccagaugugucagaaaucacuggacguggaaaccgacgggcuggaagcuaacgugccucccgugaguuuccugaaggugcugaagcugaacaagacggaguggcccuauuuugucguuggaacagugugcgcaaucgccaacggcggccuccagccggcauuuagcgugauuuucagcgagaucaucgccauauucggcccuggggaugacgcugucaagcagcagaaaugcaacaucuucagccuaauauuucucuuucugggaauuaucagcuucuucaccuucuuccugcagggguuuaccuucggaaaagccggcgagauccucacccgcagacugagauccauggccuucaaggccaugcugaggcaggauauguccugguucgaugaccacaagaacagcaccggcgcccugagcaccaggcuggccacugaugccgcucagguccagggugcuacaggcacccgccuugcccugauugcccagaacauugcuaaccuggggaccgggaucaucaucagcuuuaucuacggguggcagcugacccucuuacugcuggccguggugccaaucaucgccgugagcgggaucguggagaugaagcugcuggccggaaaugcuaagagagauaagaaggagcuggaggccgccggaaagaucgccacagaggccaucgaaaacauuagaacuguagugagccugacccaggagagaaaguuugagagcauguacguggagaagcucuacggacccuacaggaacuccgugcagaaggcacacaucuacggcaucacuuucucgauuagccaggccuucauguacuuuagcuaugccgguugcuucagguuuggugcuuaccugaucgucaauggccacaugagguuuagagacgucauccugguguuuagcgccaucgucuucggagcuguggcucugggccacgccuccagcuucgccccugacuacgccaaggccaagcugagcgccgcccaucuguucaugcuguuugaacgucagccacugaucgacucauauagcgaggaagggcugaaacccgauaaauucgagggaaauauuacauucaaugagguuguauucaacuacccuaccagagccaacgugccugugcugcagggccugucccuggaggugaaaaagggacagacccuggcucuggugggcucuagcggcuguggcaagagcaccguggugcagcugcuggagagauuuuacgauccucuggccggcacagugcugcuggacggccaggaggcuaaaaaacugaaugugcaguggcugcgggcucaacugggcaucgugucccaggagcccauacuguucgauuguagcaucgccgaaaauauugccuacggagacaauagcagagugguuucacaagaugagauuguaagugccgccaaggccgccaacauccaccccuucaucgaaacacucccccacaaguacgagacaaggguuggagauaagggcacccagcuguccgguggccagaaacagagaaucgccaucgcccgggcucugaucagacagccucagauccuccuguuggacgaggcuacuuccgccuuggacaccgaaucggagaaaguggugcaggaggcccucgacaaggcuagagagggaagaaccuguauugugaucgcgcauaggcucagcaccauccagaaugccgaucugaucgucguguuccaaaacggacgcgugaaggagcacggcacccaccagcaauugcucgcacagaaagggaucuacuucagcaugguguccgugcaggcaggcacccagaaucugugauaauaggcuggagccucgguggccaugcuucuugccccuugggccuccccccagccccuccuccccuuccugcacccguacccccuccauaaaguaggaaacacuacaguggucuuugaauaaagucugagugggcggc

SEQ ID NO: 133 - protein, 1279 aa, Artificial Sequence; identical to SEQ ID NO: 3
  Synthetic Polypeptide

SEQ ID NO: 134 - RNA, 4026 nt, Artificial Sequence
  Synthetic Polynucleotide
gggaaauaagagagaaaagaagaguaagaagaaauauaagagccaccauggaccuagaggccgcgaagaacggcaccgccuggagaccuaccuccgccgagggggacuucgaguuggguaucagcucuaaacagaagaggaagaaaaccaagacugugaaaaugauaggcgugcugacccucuucagauacuccgacuggcaggacaagcuguucaugucccucggcaccaucauggcuaucgcccauggaucuggacugccccuuaugaugaucguuuucggggagaugaccgacaaguucguggacaccgcaggaaacuucuccuuccccgugaacuucagcuugagccuguugaacccaggcaagauacucgaggaggagaugacccgcuacgccuacuacuacagcggccucggcgccggggugcugguggcagcuuauauccaggugagcuucuggacgcuggcugccggccgacagauucgcaagauccgccagaaauucuuccacgccauccuuaggcaggagaucggcugguucgauaucaacgacaccacagagcugaauacucggcuaaccgacgacauuagcaagaucagcgagggaaucggcgacaaggugggcauguuuuuccaagcuguggcuaccuucuucgccggcuucaucguaggauucauuagaggauggaagcugacccuggugaucauggcuaucagcccaaucuugggccuguccgcugccgugugggccaaaauucugucugcguuuucagauaaggagcuggccgccuacgccaaggcaggcgcugucgccgaggaggcucugggcgccaucagaacugugaucgccuucgguggacagaacaaggaguuggaaagauaucagaagcacuuggagaacgccaaggagaucggcaucaagaaggccaucucugccaauaucagcaugggcaucgcguuucugcugauuuacgccagcuacgcacuggccuucugguauggcucuaccuuggucaucagcaaggaguacaccaucggcaacgcuaugacuguguucuucuccauucugaucggcgcauucagcgugggacaggccgccccuugcaucgacgcuuucgccaacgccaggggcgccgccuacgucaucuuugacauuaucgacaacaaccccaaaaucgacucuuucagcgaaagaggccacaaacccgacuccaucaaggguaaccuggaguucaacgauguccauuucuccuacccuucuagggccaacgugaagauccugaagggccuaaaucugaaggugcagucaggacagaccgucgcucugguggguagcuccggcugcggcaaguccaccacagugcagcuuauccagagguuguaugacccugaugaaggcaccauuaauaucgacggccaggacaucaggaauuuuaaugugaauuaccugagagagauuaucggcguggucagccaggagcccguccuauucagcacaacaauagccgaaaacaucuguuauggcagggggaacgucacaauggaugagaucaagaaggccgugaaagaggcuaacgcauacgaauuuaucaugaagcucccucagaaguucgacacuuuggugggcgagagaggcgcccaacugagcggcggccagaagcagagaaucgcaaucgcuagagcccucguccggaauccaaagauccugcugcucgacgaggccacaagcgcucuugacaccgagucagaggccgaggugcaagcugcccuggacaaagcccgggagggcagaaccaccaucgugauugcccacaggcuguccaccguuagaaaugcggacgucaucgccggguucgaggacggggugauuguggagcagggcagccauagcgagcucaugaagaaggagggaguguacuucaagcuggucaauaugcagaccaguggcucucagauccagagcgaggaguucgagcugaacgacgagaaggccgccacuagaauggcccccaauggcuggaaaagcagacucuucagacacagcacgcagaagaaccugaagaacagucagaugugccagaagagucuggacgucgagaccgacggccuggaggccaacgugccccccgucaguuuccugaaggugcugaaacuaaacaaaacugaguggccuuacuucguuguaggaaccgucugcgcuaucgccaacgggggacugcagcccgccuuuagcgugaucuuuagcgaaaucaucgccaucuuuggccccggcgacgacgcugugaagcagcagaagugcaauaucuucucuuugaucuuucuguuccugggcaucaucucauucuuuacauuuuuucuccagggcuucaccuucggcaaggccggagagauucugaccagaagacugagaagcauggccuucaaggcuaugcugaggcaggacaugagcugguuugacgaucacaagaacagcacuggcgcccugagcacaagacuggcuaccgacgccgcacaggugcagggcgccaccgggacuagguuggcucugaucgcccagaauaucgccaaucugggcacuggcauuauuauuagcuucaucuauggcuggcagcugacccugcugcugcuggccguugugcccaucaucgcugugucaggcaucguggaaaugaagcuccucgcuggcaacgccaaaagggacaagaaggagcuggaggccgcaggcaagauugccaccgaggccaucgagaauauccgcaccgucgugagcuugacccaggaaagaaaguucgagagcauguacguagagaaacuguacggacccuaccgcaauuccguacagaaggcucauaucuacgggaucacuuuuuccaucucccaggccuucauguacuuuagcuacgccggcugcuuuagauucggugccuacuugaucgugaacggacacaugcgauucagagaugugauucugguguuuagcgcuauuguguucggcgccgucgcccucgggcacgccagcagcuucgcccccgacuacgcgaaggcuaagcucucagcugcgcaccuguucaugcuguucgagcgccagccccucaucgacuccuacagcgaagagggauuaaagccggauaaauucgagggcaacaucaccuuuaacgaggugguauuuaacuauccaacccgcgccaacgugccgguucugcaaggacucagccuugaggucaagaagggccagacccuugcgcucgucggcuccagcggcugcggcaaaagcaccgucgugcagcugcuggagagauucuaugacccccuggccgggacugugcugcuggacggccaggaggcuaagaagcugaacgugcaguggcuccgggcucagcugggaaucgugagccaggaaccgauacuguuugacugcagcaucgcugagaacaucgccuauggagauaacagcaggguggugucccaggaugaaauugugagcgcugccaaagccgccaacauccacccuuucaucgagacucugccccauaaguacgagaccagagugggcgacaaagguacacagcuguccggagggcagaagcagagaauugccaucgccagggccuugauuagacagccgcagauccuucugcuggacgaggccacuucugcccuggacaccgaauccgagaagguugugcaggaagcccuggacaaggcaagagagggccguaccugcaucgugaucgcccacagacugagcacgauccagaacgcagaucugaucgucguguuccagaacggaagaguuaaagagcaugggacacaccagcagcuccuggcucagaagggcaucuauuucuccauggugagcgugcaggccggcacccagaaccugugauaauaggcuggagccucgguggccaugcuucuugccccuugggccuccccccagccccuccuccccuuccugcacccguacccccuccauaaaguaggaaacacuacaguggucuuugaauaaagucugagugggcggc

SEQ ID NO: 135 - protein, 1279 aa, Artificial Sequence; identical to SEQ ID NO: 3
  Synthetic Polypeptide

SEQ ID NO: 136 - RNA, 4026 nt, Artificial Sequence; identical to SEQ ID NO: 126
  Synthetic Polynucleotide

SEQ ID NO: 137 - protein, 1279 aa, Artificial Sequence; identical to SEQ ID NO: 3
  Synthetic Polypeptide

SEQ ID NO: 138 - RNA, 4050 nt, Artificial Sequence; identical to SEQ ID NO: 130
  Synthetic Polynucleotide

SEQ ID NO: 139 - protein, 1287 aa, Artificial Sequence; identical to SEQ ID NO: 49
  Synthetic Polypeptide

SEQ ID NO: 140 - RNA, 4026 nt, Artificial Sequence; identical to SEQ ID NO: 132
  Synthetic Polynucleotide

SEQ ID NO: 141 - protein, 1279 aa, Artificial Sequence; identical to SEQ ID NO: 3
  Synthetic Polypeptide

SEQ ID NO: 142 - RNA, 4026 nt, Artificial Sequence; identical to SEQ ID NO: 134
  Synthetic Polynucleotide

SEQ ID NO: 143 - protein, 1279 aa, Artificial Sequence; identical to SEQ ID NO: 3
  Synthetic Polypeptide

SEQ ID NO: 144 - RNA, 87 nt, Artificial Sequence
  Synthetic Polynucleotide
gacagugcagucacccauaaaguagaaagcacuacuaacagcacuggaggguguaguguuuccuacuuuauggaugaguguacugug

SEQ ID NO: 145 - RNA, 23 nt, Artificial Sequence
  Synthetic Polynucleotide
uguaguguuuccuacuuuaugga

SEQ ID NO: 146 - RNA, 23 nt, Artificial Sequence
  Synthetic Polynucleotide
uccauaaaguaggaaacacuaca

SEQ ID NO: 147 - RNA, 21 nt, Artificial Sequence
  Synthetic Polynucleotide
cauaaaguagaaagcacuacu

SEQ ID NO: 148 - RNA, 21 nt, Artificial Sequence
  Synthetic Polynucleotide
aguagugcuuucuacuuuaug

SEQ ID NO: 149 - RNA, 85 nt, Artificial Sequence
  Synthetic Polynucleotide
cgcuggcgacgggacauuauuacuuuugguacgcgcugugacacuucaaacucguaccgugaguaauaaugcgccguccacggca

SEQ ID NO: 150 - RNA, 22 nt, Artificial Sequence
  Synthetic Polynucleotide
ucguaccgugaguaauaaugcg

SEQ ID NO: 151 - RNA, 22 nt, Artificial Sequence
  Synthetic Polynucleotide
cgcauuauuacucacgguacga

SEQ ID NO: 152 - RNA, 21 nt, Artificial Sequence
  Synthetic Polynucleotide
cauuauuacuuuugguacgcg

SEQ ID NO: 153 - RNA, 21 nt, Artificial Sequence
  Synthetic Polynucleotide
cgcguaccaaaaguaauaaug

SEQ ID NO: 154 - RNA, 133 nt, Artificial Sequence
  Synthetic Polynucleotide
gcuggagccucgguggccaugcuucuugccccuugggccuccccccagccccuccuccccuuccugcacccguacccccuccauaaaguaggaaacacuacaguggucuuugaauaaagucugagugggcggc

SEQ ID NO: 155 - RNA, 22 nt, Artificial Sequence
  Synthetic Polynucleotide
ccucugaaauucaguucuucag

SEQ ID NO: 156 - RNA, 22 nt, Artificial Sequence
  Synthetic Polynucleotide
ugagaacugaauuccauggguu

SEQ ID NO: 157 - RNA, 22 nt, Artificial Sequence
  Synthetic Polynucleotide
cuccuacauauuagcauuaaca

SEQ ID NO: 158 - RNA, 23 nt, Artificial Sequence
  Synthetic Polynucleotide
uuaaugcuaaucgugauaggggu

SEQ ID NO: 159 - RNA, 22 nt, Artificial Sequence
  Synthetic Polynucleotide
ccaguauuaacugugcugcuga

SEQ ID NO: 160 - RNA, 22 nt, Artificial Sequence
  Synthetic Polynucleotide
uagcagcacguaaauauuggcg

SEQ ID NO: 161 - RNA, 21 nt, Artificial Sequence
  Synthetic Polynucleotide
caacaccagucgaugggcugu

SEQ ID NO: 162 - RNA, 22 nt, Artificial Sequence
  Synthetic Polynucleotide
uagcuuaucagacugauguuga

SEQ ID NO: 163 - RNA, 22 nt, Artificial Sequence
  Synthetic Polynucleotide
ugucaguuugucaaauacccca

SEQ ID NO: 164 - RNA, 22 nt, Artificial Sequence
  Synthetic Polynucleotide
cguguauuugacaagcugaguu

SEQ ID NO: 165 - RNA, 22 nt, Artificial Sequence
  Synthetic Polynucleotide
uggcucaguucagcaggaacag

SEQ ID NO: 166 - RNA, 22 nt, Artificial Sequence
  Synthetic Polynucleotide
ugccuacugagcugauaucagu

SEQ ID NO: 167 - RNA, 21 nt, Artificial Sequence
  Synthetic Polynucleotide
uucacaguggcuaaguuccgc

SEQ ID NO: 168 - RNA, 22 nt, Artificial Sequence
  Synthetic Polynucleotide
agggcuuagcugcuugugagca

SEQ ID NO: 169 - RNA, 22 nt, Artificial Sequence
  Synthetic Polynucleotide
cgcauuauuacucacgguacga

SEQ ID NO: 170 - RNA, 141 nt, Artificial Sequence
  Synthetic Polynucleotide
ugauaauaggcuggagccucgguggccaugcuucuugccccuugggccuccccccagccccuccuccccuuccugcacccguaccccccgcauuauuacucacgguacgaguggucuuugaauaaagucugagugggcggc

SEQ ID NO: 171 - RNA, 119 nt, Artificial Sequence; identical to SEQ ID NO: 13
  Synthetic Polynucleotide

SEQ ID NO: 172 - RNA, 142 nt, Artificial Sequence
  Synthetic Polynucleotide
ugauaauaggcuggagccucgguggccaugcuucuugccccuugggccuccccccagccccuccuccccuuccugcacccguacccccuccauaaaguaggaaacacuacaguggucuuugaauaaagucugagugggcggc

SEQ ID NO: 173 - RNA, 164 nt, Artificial Sequence
  Synthetic Polynucleotide
ugauaauaguccauaaaguaggaaacacuacagcuggagccucgguggccaugcuucuugccccuugggccuccccccagccccuccuccccuuccugcacccguaccccccgcauuauuacucacgguacgaguggucuuugaauaaagucugagugggcggc

SEQ ID NO: 174 - RNA, 23 nt, Artificial Sequence
  Synthetic Polynucleotide
uuaaugcuaauugugauaggggu

SEQ ID NO: 175 - RNA, 23 nt, Artificial Sequence
  Synthetic Polynucleotide
accccuaucacaauuagcauuaa

SEQ ID NO: 176 - RNA, 188 nt, Artificial Sequence
  Synthetic Polynucleotide
ugauaauaguccauaaaguaggaaacacuacagcuggagccucgguggccaugcuucuugccccuugggccuccauaaaguaggaaacacuacauccccccagccccuccuccccuuccugcacccguacccccuccauaaaguaggaaacacuacaguggucuuugaauaaagucugagugggcggc

SEQ ID NO: 177 - RNA, 140 nt, Artificial Sequence
  Synthetic Polynucleotide
ugauaauaggcuggagccucgguggccaugcuucuugccccuugggccuccccccagccccuccuccccuuccugcacccguacccccaguagugcuuucuacuuuaugguggucuuugaauaaagucugagugggcggc

SEQ ID NO: 178 - RNA, 182 nt, Artificial Sequence
  Synthetic Polynucleotide
ugauaauagaguagugcuuucuacuuuauggcuggagccucgguggccaugcuucuugccccuugggccaguagugcuuucuacuuuauguccccccagccccuccuccccuuccugcacccguacccccaguagugcuuucuacuuuaugguggucuuugaauaaagucugagugggcggc

SEQ ID NO: 179 - RNA, 184 nt, Artificial Sequence
  Synthetic Polynucleotide
ugauaauagaguagugcuuucuacuuuauggcuggagccucgguggccaugcuucuugccccuugggccuccauaaaguaggaaacacuacauccccccagccccuccuccccuuccugcacccguacccccaguagugcuuucuacuuuaugguggucuuugaauaaagucugagugggcggc

SEQ ID NO: 180 - RNA, 142 nt, Artificial Sequence
  Synthetic Polynucleotide
ugauaauaggcuggagccucgguggccaugcuucuugccccuugggccuccccccagccccuccuccccuuccugcacccguacccccaccccuaucacaauuagcauuaaguggucuuugaauaaagucugagugggcggc

SEQ ID NO: 181 - RNA, 188 nt, Artificial Sequence
  Synthetic Polynucleotide
ugauaauagaccccuaucacaauuagcauuaagcuggagccucgguggccaugcuucuugccccuugggccaccccuaucacaauuagcauuaauccccccagccccuccuccccuuccugcacccguacccccaccccuaucacaauuagcauuaaguggucuuugaauaaagucugagugggcggc

SEQ ID NO: 182 - RNA, 188 nt, Artificial Sequence
  Synthetic Polynucleotide
ugauaauagaccccuaucacaauuagcauuaagcuggagccucgguggccaugcuucuugccccuugggccuccauaaaguaggaaacacuacauccccccagccccuccuccccuuccugcacccguacccccaccccuaucacaauuagcauuaaguggucuuugaauaaagucugagugggcggc

SEQ ID NO: 183 - RNA, 142 nt, Artificial Sequence
  Synthetic Polynucleotide
ugauaauaguccauaaaguaggaaacacuacagcuggagccucgguggccaugcuucuugccccuugggccuccccccagccccuccuccccuuccugcacccguacccccguggucuuugaauaaagucugagugggcggc

SEQ ID NO: 184 - RNA, 142 nt, Artificial Sequence
  Synthetic Polynucleotide
ugauaauaggcuggagccucgguggcuccauaaaguaggaaacacuacacaugcuucuugccccuugggccuccccccagccccuccuccccuuccugcacccguacccccguggucuuugaauaaagucugagugggcggc

SEQ ID NO: 185 - RNA, 142 nt, Artificial Sequence
  Synthetic Polynucleotide
ugauaauaggcuggagccucgguggccaugcuucuugccccuugggccuccauaaaguaggaaacacuacauccccccagccccuccuccccuuccugcacccguacccccguggucuuugaauaaagucugagugggcggc

SEQ ID NO: 186 - RNA, 47 nt, Artificial Sequence; identical to SEQ ID NO: 12
  Synthetic Polynucleotide

SEQ ID NO: 187 - RNA, 70 nt, Artificial Sequence
  Synthetic Polynucleotide
gggaaauaagaguccauaaaguaggaaacacuacaagaaaagaagaguaagaagaaauauaagagccacc

SEQ ID NO: 188 - RNA, 70 nt, Artificial Sequence
  Synthetic Polynucleotide
gggaaauaagagagaaaagaagaguaauccauaaaguaggaaacacuacagaagaaauauaagagccacc

SEQ ID NO: 189 - RNA, 70 nt, Artificial Sequence
  Synthetic Polynucleotide
gggaaauaagagagaaaagaagaguaagaagaaauauaauccauaaaguaggaaacacuacagagccacc

SEQ ID NO: 190 - RNA, 181 nt, Artificial Sequence
  Synthetic Polynucleotide
ugauaauagaguagugcuuucuacuuuauggcuggagccucgguggccaugcuucuugccccuugggccaguagugcuuucuacuuuauguccccccagccccucuccccuuccugcacccguacccccaguagugcuuucuacuuuaugguggucuuugaauaaagucugagugggcggc

SEQ ID NO: 191 - RNA, 142 nt, Artificial Sequence
  Synthetic Polynucleotide
ugauaauaggcuggagccucgguggccaugcuucuugccccuuccauaaaguaggaaacacuacaugggccuccccccagccccuccuccccuuccugcacccguacccccguggucuuugaauaaagucugagugggcggc

SEQ ID NO: 192 - RNA, 142 nt, Artificial Sequence
  Synthetic Polynucleotide
ugauaauaggcuggagccucgguggccaugcuucuugccccuugggccuccccccaguccauaaaguaggaaacacuacaccccuccuccccuuccugcacccguacccccguggucuuugaauaaagucugagugggcggc

SEQ ID NO: 193 - RNA, 142 nt, Artificial Sequence
  Synthetic Polynucleotide
ugauaauaggcuggagccucgguggccaugcuucuugccccuugggccuccccccagccccuccuccccuucuccauaaaguaggaaacacuacacugcacccguacccccguggucuuugaauaaagucugagugggcggc

SEQ ID NO: 194 - RNA, 142 nt, Artificial Sequence
  Synthetic Polynucleotide
ugauaauaggcuggagccucgguggccaugcuucuugccccuugggccuccccccagccccuccuccccuuccugcacccguacccccguggucuuugaauaaaguuccauaaaguaggaaacacuacacugagugggcggc

SEQ ID NO: 195 - RNA, 164 nt, Artificial Sequence
  Synthetic Polynucleotide
ugauaauaguccauaaaguaggaaacacuacagcuggagccucgguggccuagcuucuugccccuugggccuccccccagccccuccuccccuuccugcacccguaccccccgcauuauuacucacgguacgaguggucuuugaauaaagucugagugggcggc

SEQ ID NO: 196 - RNA, 119 nt, Artificial Sequence
  Synthetic Polynucleotide
ugauaauaggcuggagccucgguggccuagcuucuugccccuugggccuccccccagccccuccuccccuuccugcacccguacccccguggucuuugaauaaagucugagugggcggc

SEQ ID NO: 197 - RNA, 142 nt, Artificial Sequence
  Synthetic Polynucleotide
ugauaauaggcuggagccucgguggccuagcuucuugccccuugggccuccccccagccccuccuccccuuccugcacccguacccccuccauaaaguaggaaacacuacaguggucuuugaauaaagucugagugggcggc

SEQ ID NO: 198 - RNA, 141 nt, Artificial Sequence
  Synthetic Polynucleotide
ugauaauaggcuggagccucgguggccuagcuucuugccccuugggccuccccccagccccuccuccccuuccugcacccguaccccccgcauuauuacucacgguacgaguggucuuugaauaaagucugagugggcggc

SEQ ID NO: 199 - RNA, 188 nt, Artificial Sequence
  Synthetic Polynucleotide
ugauaauaguccauaaaguaggaaacacuacagcuggagccucgguggccuagcuucuugccccuugggccuccauaaaguaggaaacacuacauccccccagccccuccuccccuuccugcacccguacccccuccauaaaguaggaaacacuacaguggucuuugaauaaagucugagugggcggc

SEQ ID NO: 200 - RNA, 142 nt, Artificial Sequence
  Synthetic Polynucleotide
ugauaauaguccauaaaguaggaaacacuacagcuggagccucgguggccuagcuucuugccccuugggccuccccccagccccuccuccccuuccugcacccguacccccguggucuuugaauaaagucugagugggcggc

SEQ ID NO: 201 - RNA, 142 nt, Artificial Sequence
  Synthetic Polynucleotide
ugauaauaggcuggagccucgguggcuccauaaaguaggaaacacuacacuagcuucuugccccuugggccuccccccagccccuccuccccuuccugcacccguacccccguggucuuugaauaaagucugagugggcggc

SEQ ID NO: 202 - RNA, 142 nt, Artificial Sequence
  Synthetic Polynucleotide
ugauaauaggcuggagccucgguggccuagcuucuugccccuugggccuccauaaaguaggaaacacuacauccccccagccccuccuccccuuccugcacccguacccccguggucuuugaauaaagucugagugggcggc

SEQ ID NO: 203 - RNA, 142 nt, Artificial Sequence
  Synthetic Polynucleotide
ugauaauaggcuggagccucgguggccuagcuucuugccccuugggccuccccccagccccuccuccccuuccugcacccguacccccaccccuaucacaauuagcauuaaguggucuuugaauaaagucugagugggcggc

SEQ ID NO: 204 - RNA, 188 nt, Artificial Sequence
  Synthetic Polynucleotide
ugauaauagaccccuaucacaauuagcauuaagcuggagccucgguggccuagcuucuugccccuugggccaccccuaucacaauuagcauuaauccccccagccccuccuccccuuccugcacccguacccccaccccuaucacaauuagcauuaaguggucuuugaauaaagucugagugggcggc

SEQ ID NO: 205 - RNA, 188 nt, Artificial Sequence
  Synthetic Polynucleotide
ugauaauagaccccuaucacaauuagcauuaagcuggagccucgguggccuagcuucuugccccuugggccuccauaaaguaggaaacacuacauccccccagccccuccuccccuuccugcacccguacccccaccccuaucacaauuagcauuaaguggucuuugaauaaagucugagugggcggc

SEQ ID NO: 206 - RNA, 371 nt, Artificial Sequence
  Synthetic Polynucleotide
gcgccugcccaccugccaccgacugcuggaacccagccagugggagggccuggcccaccagaguccugcucccucacuccucgccccgcccccugucccagagucccaccugggggcucucuccacccuucucagaguuccaguuucaaccagaguuccaaccaaugggcuccauccucuggauucuggccaaugaaauaucucccuggcaggguccucuucuuuucccagagcuccaccccaaccaggagcucuaguuaauggagagcucccagcacacucggagcuugugcuuugucuccacgcaaagcgauaaauaaaagcauugguggccuuuggucuuugaauaaagccugaguaggaagucuaga

SEQ ID NO: 207 - RNA, 568 nt, Artificial Sequence
  Synthetic Polynucleotide
gccccugccgcucccacccccacccaucugggccccggguucaagagagagcggggucugaucucguguagccauauagaguuugcuucugagugucugcuuuguuuaguagaggugggcaggaggagcugaggggcuggggcugggguguugaaguuggcuuugcaugcccagcgaugcgccucccugugggaugucaucacccugggaaccgggaguggcccuuggcucacuguguucugcaugguuuggaucugaauuaauuguccuuucuucuaaaucccaaccgaacuucuuccaaccuccaaacuggcuguaaccccaaauccaagccauuaacuacaccugacaguagcaauugucugauuaaucacuggccccuugaagacagcagaaugucccuuugcaaugaggaggagaucugggcugggcgggccagcuggggaagcauuugacuaucuggaacuugugugugccuccucagguauggcagugacucaccugguuuuaauaaaacaaccugcaacaucucauggucuuugaauaaagccugaguaggaagucuaga

SEQ ID NO: 208 - RNA, 289 nt, Artificial Sequence
  Synthetic Polynucleotide
acacacuccaccuccagcacgcgacuucucaggacgacgaaucuucucaaugggggggcggcugagcuccagccaccccgcagucacuuucuuuguaacaacuuccguugcugccaucguaaacugacacaguguuuauaacguguacauacauuaacuuauuaccucauuuuguuauuuuucgaaacaaagcccuguggaagaaaauggaaaacuugaagaagcauuaaagucauucuguuaagcugcguaaauggucuuugaauaaagccugaguaggaagucuaga

SEQ ID NO: 209 - RNA, 379 nt, Artificial Sequence
  Synthetic Polynucleotide
caucacauuuaaaagcaucucagccuaccaugagaauaagagaaagaaaaugaagaucaaaagcuuauucaucuguuuuucuuuuucguugguguaaagccaacacccugucuaaaaaacauaaauuucuuuaaucauuuugccucuuuucucugugcuucaauuaauaaaaaauggaaagaaucuaauagagugguacagcacuguuauuuuucaaagauguguugcuauccugaaaauucuguagguucuguggaaguuccaguguucucucuuauuccacuucgguagaggauuucuaguuucuugugggcuaauuaaauaaaucauuaauacucuucuaauggucuuugaauaaagccugaguaggaagucuaga

SEQ ID NO: 210 - RNA, 118 nt, Artificial Sequence
  Synthetic Polynucleotide
gcugccuucugcggggcuugccuucuggccaugcccuucuucucucccuugcaccuguaccucuuggucuuugaauaaagccugaguaggaaggcggccgcucgagcaugcaucuaga

SEQ ID NO: 211 - RNA, 908 nt, Artificial Sequence
  Synthetic Polynucleotide
gccaagcccuccccaucccauguauuuaucucuauuuaauauuuaugucuauuuaagccucauauuuaaagacagggaagagcagaacggagccccaggccucuguguccuucccugcauuucugaguuucauucuccugccuguagcagugagaaaaagcuccuguccucccauccccuggacugggagguagauagguaaauaccaaguauuuauuacuaugacugcuccccagcccuggcucugcaaugggcacugggaugagccgcugugagccccugguccugaggguccccaccugggacccuugagaguaucaggucucccacgugggagacaagaaaucccuguuuaauauuuaaacagcaguguuccccaucuggguccuugcaccccucacucuggccucagccgacugcacagcggccccugcauccccuuggcugugaggccccuggacaagcagagguggccagagcugggaggcauggcccuggggucccacgaauuugcuggggaaucucguuuuucuucuuaagacuuuugggacaugguuugacucccgaacaucaccgacgcgucuccuguuuuucuggguggccucgggacaccugcccugcccccacgagggucaggacugugacucuuuuuagggccaggcaggugccuggacauuugccuugcuggacggggacuggggaugugggagggagcagacaggaggaaucaugucaggccugugugugaaaggaagcuccacugucacccuccaccucuucaccccccacucaccaguguccccuccacugucacauuguaacugaacuucaggauaauaaaguguuugccuccauggucuuugaauaaagccugaguaggaaggcggccgcucgagcaugcaucuaga

SEQ ID NO: 212 - RNA, 835 nt, Artificial Sequence
  Synthetic Polynucleotide
acucaaucuaaauuaaaaaagaaagaaauuugaaaaaacuuucucuuugccauuucuucuucuucuuuuuuaacugaaagcugaauccuuccauuucuucugcacaucuacuugcuuaaauugugggcaaaagagaaaaagaaggauugaucagagcauugugcaauacaguuucauuaacuccuucccccgcucccccaaaaauuugaauuuuuuuuucaacacucuuacaccuguuauggaaaaugucaaccuuuguaagaaaaccaaaauaaaaauugaaaaauaaaaaccauaaacauuugcaccacuuguggcuuuugaauaucuuccacagagggaaguuuaaaacccaaacuuccaaagguuuaaacuaccucaaaacacuuucccaugagugugauccacauuguuaggugcugaccuagacagagaugaacugagguccuuguuuuguuuuguucauaauacaaaggugcuaauuaauaguauuucagauacuugaagaauguugauggugcuagaagaauuugagaagaaauacuccuguauugaguuguaucgugugguguauuuuuuaaaaaauuugauuuagcauucauauuuuccaucuuauucccaauuaaaaguaugcagauuauuugcccaaaucuucuucagauucagcauuuguucuuugccagucucauuuucaucuucuuccaugguuccacagaagcuuuguuucuugggcaagcagaaaaauuaaauuguaccuauuuuguauaugugagauguuuaaauaaauugugaaaaaaaugaaauaaagcauguuugguuuuccaaaagaacauau

SEQ ID NO: 213 - RNA, 297 nt, Artificial Sequence
  Synthetic Polynucleotide
cgccgccgcccgggccccgcagucgagggucgugagcccaccccguccauggugcuaagcgggcccgggucccacacggccagcaccgcugcucacucggacgacgcccugggccugcaccucuccagcuccucccacgggguccccguagccccggcccccgcccagccccaggucuccccaggcccuccgcaggcugcccggccucccucccccugcagccaucccaaggcuccugaccuaccuggccccugagcucuggagcaagcccugacccaauaaaggcuuugaacccau

SEQ ID NO: 214 - RNA, 602 nt, Artificial Sequence
  Synthetic Polynucleotide
ggggcuagagcccucuccgcacagcguggagacggggcaaggagggggguuauuaggauuggugguuuuguuuugcuuuguuuaaagccgugggaaaauggcacaacuuuaccucugugggagaugcaacacugagagccaaggggugggaguugggauaauuuuuauauaaaagaaguuuuuccacuuugaauugcuaaaaguggcauuuuuccuaugugcagucacuccucucauuucuaaaauagggacguggccaggcacgguggcucaugccuguaaucccagcacuuugggaggccgaggcaggcggcucacgaggucaggagaucgagacuauccuggcuaacacgguaaaacccugucucuacuaaaaguacaaaaaauuagcugggcgugguggugggcaccuguagucccagcuacucgggaggcugaggcaggagaaaggcaugaauccaagaggcagagcuugcagugagcugagaucacgccauugcacuccagccugggcaacaguguuaagacucugucucaaauauaaauaaauaaauaaauaaauaaauaaauaaauaaaaauaaagcgagauguugcccucaaa

SEQ ID NO: 215 - RNA, 785 nt, Artificial Sequence
  Synthetic Polynucleotide
ggcccugccccgucggacugcccccagaaagccuccugcccccugccagugaaguccuucagugagccccuccccagccagcccuucccuggccccgccggauguauaaauguaaaaaugaaggaauuacauuuuauaugugagcgagcaagccggcaagcgagcacaguauuauuucuccauccccucccugccugcuccuuggcacccccaugcugccuucagggagacaggcagggagggcuuggggcugcaccuccuacccucccaccagaacgcaccccacugggagagcugguggugcagccuuccccucccuguauaagacacuuugccaaggcucuccccucucgccccaucccugcuugcccgcucccacagcuuccugagggcuaauucugggaagggagaguucuuugcugccccugucuggaagacguggcucugggugagguaggcgggaaaggauggaguguuuuaguucuugggggaggccaccccaaaccccagccccaacuccaggggcaccuaugagauggccaugcucaaccccccucccagacaggcccucccugucuccagggcccccaccgagguucccagggcuggagacuuccucugguaaacauuccuccagccuccccuccccuggggacgccaaggaggugggccacacccaggaagggaaagcgggcagccccguuuuggggacgugaacguuuuaauaauuuuugcugaauuccuuuacaacuaaauaacacagauauuguuauaaauaaaauugu

SEQ ID NO: 216 - RNA, 3001 nt, Artificial Sequence
  Synthetic Polynucleotide
auauuaaggaucaagcuguuagcuaauaaugccaccucugcaguuuugggaacaggcaaauaaaguaucaguauacauggugauguacaucuguagcaaagcucuuggagaaaaugaagacugaagaaagcaaagcaaaaacuguauagagagauuuuucaaaagcaguaaucccucaauuuuaaaaaaggauugaaaauucuaaaugucuuucugugcauauuuuuuguguuaggaaucaaaaguauuuuauaaaaggagaaagaacagccucauuuuagauguaguccuguuggauuuuuuaugccuccucaguaaccagaaauguuuuaaaaaacuaaguguuuaggauuucaagacaacauuauacauggcucugaaauaucugacacaauguaaacauugcaggcaccugcauuuuauguuuuuuuuuucaacaaaugugacuaauuugaaacuuuuaugaacuucugagcuguccccuugcaauucaaccgcaguuugaauuaaucauaucaaaucaguuuuaauuuuuuaaauuguacuucagagucuauauuucaagggcacauuuucucacuacuauuuuaauacauuaaaggacuaaauaaucuuucagagaugcuggaaacaaaucauuugcuuuauauguuucauuagaauaccaaugaaacauacaacuugaaaauuaguaauaguauuuuugaagaucccauuucuaauuggagaucucuuuaauuucgaucaacuuauaauguguaguacuauauuaagugcacuugaguggaauucaacauuugacuaauaaaaugaguucaucauguuggcaagugauguggcaauuaucucuggugacaaaagaguaaaaucaaauauuucugccuguuacaaauaucaaggaagaccugcuacuaugaaauagaugacauuaaucugucuucacuguuuauaauacggauggauuuuuuuucaaaucaguguguguuuugaggucuuauguaauugaugacauuugagagaaaugguggcuuuuuuuagcuaccucuuuguucauuuaagcaccaguaaagaucaugucuuuuuauagaaguguagauuuucuuugugacuuugcuaucgugccuaaagcucuaaauauaggugaaugugugaugaauacucagauuauuugucucucuauauaauuaguuugguacuaaguuucucaaaaaauuauuaacacaugaaagacaaucucuaaaccagaaaaagaaguaguacaaauuuuguuacuguaaugcucgcguuuagugaguuuaaaacacacaguaucuuuugguuuuauaaucaguuucuauuuugcugugccugagauuaagaucuguguaugugugugugugugugugugcguuuguguguuaaagcagaaaagacuuuuuuaaaaguuuuaagugauaaaugcaauuuguuaauugaucuuagaucacuaguaaacucagggcugaauuauaccauguauauucuauuagaagaaaguaaacaccaucuuuauuccugcccuuuuucuucucucaaaguaguuguaguuauaucuagaaagaagcaauuuugauuucuugaaaagguaguuccugcacucaguuuaaacuaaaaauaaucauacuuggauuuuauuuauuuuugucauaguaaaaauuuuaauuuauauauauuuuuauuuaguauuaucuuauucuuugcuauuugccaauccuuugucaucaauuguguuaaaugaauugaaaauucaugcccuguucauuuuauuuuacuuuauugguuaggauauuuaaaggauuuuuguauauauaauuucuuaaauuaauauuccaaaagguuaguggacuuagauuauaaauuauggcaaaaaucuaaaaacaacaaaaaugauuuuuauacauucuauuucauuauuccucuuuuuccaauaagucauacaauugguagauaugacuuauuuuauuuuuguauuauucacuauaucuuuaugauauuuaaguauaaauaauuaaaaaaauuuauuguaccuuauagucugucaccaaaaaaaaaaaauuaucuguagguagugaaaugcuaauguugauuugucuuuaagggcuuguuaacuauccuuuauuuucucauuugucuuaaauuaggaguuuguguuuaaauuacucaucuaagcaaaaaauguauauaaaucccauuacuggguauauacccaaaggauuauaaaucaugcugcuauaaagacacaugcacacguauguuuauugcagcacuauucacaauagcaaagacuuggaaccaacccaaauguccaucaaugauagacuugauuaagaaaaugugcacauauacaccauggaauacuaugcagccauaaaaaaggaugaguucauguccuuuguagggacauggauaaagcuggaaaccaucauucugagcaaacuauugcaaggacagaaaaccaaacacugcauguucucacucauaggugggaauugaacaaugagaacacuuggacacaagguggggaacaccacacaccagggccugucaugggguggggggaguggggagggauagcauuaggagauauaccuaauguaaaugaugaguuaaugggugcagcacaccaacauggcacauguauacauauguagcaaaccugcacguugugcacauguacccuagaacuuaaaguauaauuaaaaaaaaaaagaaaacagaagcuauuuauaaagaaguuauuugcugaaauaaaugugaucuuucccauuaaaaaaauaaagaaauuuugggguaaaaaaacacaauauauuguauucuugaaaaauucuaagagaguggaugugaaguguucucaccacaaaagugauaacuaauugagguaaugcacauauuaauuagaaagauuuugucauuccacaauguauauauacuuaaaaauauguuauacacaauaaauacauacauuaaaaaauaaguaaaugua

SEQ ID NO: 217 - RNA, 1037 nt, Artificial Sequence
  Synthetic Polynucleotide
cccacccugcacgccggcaccaaacccuguccucccaccccuccccacucaucacuaaacagaguaaaaugugaugcgaauuuucccgaccaaccugauucgcuagauuuuuuuuaaggaaaagcuuggaaagccaggacacaacgcugcugccugcuuugugcaggguccuccggggcucagcccugaguuggcaucaccugcgcagggcccucuggggcucagcccugagcuagugucaccugcacagggcccucugaggcucagcccugagcuggcgucaccugugcagggcccucuggggcucagcccugagcuggccucaccuggguuccccaccccgggcucuccugcccugcccuccugcccgcccucccuccugccugcgcagcuccuucccuaggcaccucugugcugcaucccaccagccugagcaagacgcccucucggggccugugccgcacuagccucccucuccucuguccccauagcugguuuuucccaccaauccucaccuaacaguuacuuuacaauuaaacucaaagcaagcucuucuccucagcuuggggcagccauuggccucugucucguuuugggaaaccaaggucaggaggccguugcagacauaaaucucggcgacucggccccgucuccugaggguccugcuggugaccggccuggaccuuggcccuacagcccuggaggccgcugcugaccagcacugaccccgaccucagagaguacucgcaggggcgcuggcugcacucaagacccucgagauuaacggugcuaaccccgucugcuccucccucccgcagagacuggggccuggacuggacaugagagccccuuggugccacagagggcugugucuuacuagaaacaacgcaaaccucuccuuccucagaauagugauguguucgacguuuuaucaaaggcccccuuucuauguucauguuaguuuugcuccuucuguguuuuuuucugaaccauauccauguugcugacuuuuccaaauaaagguuuucacuccucuc

SEQ ID NO: 218 - RNA, 577 nt, Artificial Sequence
  Synthetic Polynucleotide
agaggccugccuccagggcuggacugaggccugagcgcuccugccgcagagcuggccgcgccaaauaaugucucugugagacucgagaacuuucauuuuuuuccaggcugguucggauuugggguggauuuugguuuuguuccccuccuccacucucccccacccccuccccgcccuuuuuuuuuuuuuuuuuuaaacugguauuuuaucuuugauucuccuucagcccucaccccugguucucaucuuucuugaucaacaucuuuucuugccucuguccccuucucucaucucuuagcuccccuccaaccuggggggcagugguguggagaagccacaggccugagauuucaucugcucuccuuccuggagcccagaggagggcagcagaaggggguggugucuccaaccccccagcacugaggaagaacggggcucuucucauuucaccccucccuuucuccccugcccccaggacugggccacuucuggguggggcagugggucccagauuggcucacacugagaauguaagaacuacaaacaaaauuucuauuaaauuaaauuuugugucucc

SEQ ID NO: 219 - RNA, 2212 nt, Artificial Sequence
  Synthetic Polynucleotide
cucccuccaucccaaccuggcucccucccacccaaccaacuuuccccccaacccggaaacagacaagcaacccaaacugaacccccucaaaagccaaaaaaugggagacaauuucacauggacuuuggaaaauauuuuuuuccuuugcauucaucucucaaacuuaguuuuuaucuuugaccaaccgaacaugaccaaaaaccaaaagugcauucaaccuuaccaaaaaaaaaaaaaaaaaaagaauaaauaaauaacuuuuuaaaaaaggaagcuugguccacuugcuugaagacccaugcggggguaagucccuuucugcccguugggcuuaugaaaccccaaugcugcccuuucugcuccuuucuccacaccccccuuggggccuccccuccacuccuucccaaaucugucuccccagaagacacaggaaacaauguauugucugcccagcaaucaaaggcaaugcucaaacacccaaguggcccccacccucagcccgcuccugcccgcccagcacccccaggcccugggggaccugggguucucagacugccaaagaagccuugccaucuggcgcucccauggcucuugcaacaucuccccuucguuuuugagggggucaugccgggggagccaccagccccucacuggguucggaggagagucaggaagggccacgacaaagcagaaacaucggauuuggggaacgcgugucaaucccuugugccgcagggcugggcgggagagacuguucuguuccuuguguaacuguguugcugaaagacuaccucguucuugucuugaugugucaccggggcaacugccugggggcggggaugggggcaggguggaagcggcuccccauuuuauaccaaaggugcuacaucuaugugaugggugggguggggagggaaucacuggugcuauagaaauugagaugcccccccaggccagcaaauguuccuuuuuguucaaagucuauuuuuauuccuugauauuuuucuuuuuuuuuuuuuuuuuuuguggauggggacuugugaauuuuucuaaaggugcuauuuaacaugggaggagagcgugugcggcuccagcccagcccgcugcucacuuuccacccucucuccaccugccucuggcuucucaggccucugcucuccgaccucucuccucugaaacccuccuccacagcugcagcccauccucccggcucccuccuagucuguccugcguccucuguccccggguuucagagacaacuucccaaagcacaaagcaguuuuucccccuaggggugggaggaagcaaaagacucuguaccuauuuuguauguguauaauaauuugagauguuuuuaauuauuuugauugcuggaauaaagcauguggaaaugacccaaacauaauccgcaguggccuccuaauuuccuucuuuggaguugggggagggguagacauggggaaggggcuuuggggugaugggcuugccuuccauuccugcccuuucccuccccacuauucucuucuagaucccuccauaaccccacuccccuuucucucacccuucuuauaccgcaaaccuuucuacuuccucuuucauuuucuauucuugcaauuuccuugcaccuuuuccaaauccucuucuccccugcaauaccauacaggcaauccacgugcacaacacacacacacacucuucacaucugggguuguccaaaccucauacccacuccccuucaagcccauccacucuccacccccuggaugcccugcacuugguggcggugggaugcucauggauacugggagggugaggggaguggaacccgugaggaggaccugggggccucuccuugaacugacaugaagggucaucuggccucugcucccuucucacccacgcugaccuccugccgaaggagcaacgcaacaggagaggggucugcugagccuggcgagggucugggagggaccaggaggaaggcgugcucccugcucgcuguccuggcccugggggagugagggagacagacaccugggagagcuguggggaaggcacucgcaccgugcucuugggaaggaaggagaccuggcccugcucaccacggacugggugccucgaccuccugaauccccagaacacaaccccccugggcugggguggucuggggaaccaucgugcccccgccucccgccuacuccuuuuuaagcuu

SEQ ID NO: 220 - RNA, 729 nt, Artificial Sequence
  Synthetic Polynucleotide
uuggccaggccugacccucuuggaccuuucuucuuugccgacaaccacugcccagcagccucugggaccucggggucccagggaacccaguccagccuccuggcuguugacuucccauugcucuuggagccaccaaucaaagagauucaaagagauuccugcaggccagaggcggaacacaccuuuauggcuggggcucuccgugguguucuggacccagccccuggagacaccauucacuuuuacugcuuuguagugacucgugcucuccaaccugucuuccugaaaaaccaaggcccccuucccccaccucuuccauggggugagacuugagcagaacaggggcuuccccaaguugcccagaaagacugucugggugagaagccauggccagagcuucucccaggcacagguguugcaccagggacuucugcuucaaguuuugggguaaagacaccuggaucagacuccaagggcugcccugagucugggacuucugccuccauggcuggucaugagagcaaaccguaguccccuggagacagcgacuccagagaaccucuugggagacagaagaggcaucugugcacagcucgaucuucuacuugccuguggggaggggagugacagguccacacaccacacugggucacccuguccuggaugccucugaagagagggacagaccgucagaaacuggagaguuucuauuaaaggucauuuaaacca

SEQ ID NO: 221 - RNA, 847 nt, Artificial Sequence
  Synthetic Polynucleotide
uccuccgggaccccagcccucaggauuccugaugcuccaaggcgacugaugggcgcuggaugaaguggcacagucagcuucccugggggcuggugucauguugggcuccuggggcgggggcacggccuggcauuucacgcauugcugccaccccagguccaccugucuccacuuucacagccuccaagucuguggcucuucccuucuguccuccgaggggcuugccuucucucguguccagugaggugcucagugaucggcuuaacuuagagaagcccgcccccuccccuucuccgucugucccaagagggucugcucugagccugcguuccuagguggcucggccucagcugccuggguuguggccgcccuagcauccuguaugcccacagcuacuggaauccccgcugcugcuccgggccaagcuucugguugauuaaugagggcaugggguggucccucaagaccuuccccuaccuuuuguggaaccagugaugccucaaagacaguguccccuccacagcugggugccaggggcaggggauccucaguauagccggugaacccugauaccaggagccugggccucccugaaccccuggcuuccagccaucucaucgccagccuccuccuggaccucuuggcccccagccccuuccccacacagccccagaagggucccagagcugaccccacuccaggaccuaggcccagccccucagccucaucuggagccccugaagaccagucccacccaccuuucuggccucaucugacacugcuccgcauccugcuguguguccuguuccauguuccgguuccauccaaauacacuuucuggaacaaa

SEQ ID NO: 222 - RNA, 110 nt, Artificial Sequence
  Synthetic Polynucleotide
gcuggagccucgguggccaugcuucuugccccuugggccuccccccagccccuccuccccuuccugcacccguacccccguggucuuugaauaaagucugagugggcggc

SEQ ID NO: 223 - RNA, 47 nt, Artificial Sequence
  Synthetic Polynucleotide
gggagaucagagagaaaagaagaguaagaagaaauauaagagccacc

SEQ ID NO: 224 - RNA, 145 nt, Artificial Sequence
  Synthetic Polynucleotide
ggaauaaaagucucaacacaacauauacaaaacaaacgaaucucaagcaaucaagcauucuacuucuauugcagcaauuuaaaucauuucuuuuaaagcaaaagcaauuuucugaaaauuuucaccauuuacgaacgauagcaac

SEQ ID NO: 225 - RNA, 42 nt, Artificial Sequence
  Synthetic Polynucleotide
gggagacaagcuuggcauuccgguacuguugguaaagccacc

SEQ ID NO: 226 - RNA, 47 nt, Artificial Sequence; identical to SEQ ID NO: 223
  Synthetic Polynucleotide

SEQ ID NO: 227 - RNA, 145 nt, Artificial Sequence; identical to SEQ ID NO: 224
  Synthetic Polynucleotide

SEQ ID NO: 228 - RNA, 42 nt, Artificial Sequence; identical to SEQ ID NO: 225
  Synthetic Polynucleotide

SEQ ID NO: 229 - RNA, 47 nt, Artificial Sequence
  Synthetic Polynucleotide
gggaauuaacagagaaaagaagaguaagaagaaauauaagagccacc

SEQ ID NO: 230 - RNA, 47 nt, Artificial Sequence
  Synthetic Polynucleotide
gggaaauuagacagaaaagaagaguaagaagaaauauaagagccacc

SEQ ID NO: 231 - RNA, 47 nt, Artificial Sequence
  Synthetic Polynucleotide
gggaaauaagagaguaaagaacaguaagaagaaauauaagagccacc

SEQ ID NO: 232 - RNA, 47 nt, Artificial Sequence
  Synthetic Polynucleotide
gggaaaaaagagagaaaagaagacuaagaagaaauauaagagccacc

SEQ ID NO: 233 - RNA, 47 nt, Artificial Sequence
  Synthetic Polynucleotide
gggaaauaagagagaaaagaagaguaagaagauauauaagagccacc

SEQ ID NO: 234 - RNA, 47 nt, Artificial Sequence
  Synthetic Polynucleotide
gggaaauaagagacaaaacaagaguaagaagaaauauaagagccacc

SEQ ID NO: 235 - RNA, 47 nt, Artificial Sequence
  Synthetic Polynucleotide
gggaaauuagagaguaaagaacaguaaguagaauuaaaagagccacc

SEQ ID NO: 236 - RNA, 47 nt, Artificial Sequence
  Synthetic Polynucleotide
gggaaauaagagagaauagaagaguaagaagaaauauaagagccacc

SEQ ID NO: 237 - RNA, 47 nt, Artificial Sequence
  Synthetic Polynucleotide
gggaaauaagagagaaaagaagaguaagaagaaaauuaagagccacc

SEQ ID NO: 238 - RNA, 47 nt, Artificial Sequence
  Synthetic Polynucleotide
gggaaauaagagagaaaagaagaguaagaagaaauuuaagagccacc

SEQ ID NO: 239 - RNA, 92 nt, Artificial Sequence
  Synthetic Polynucleotide
ucaagcuuuuggacccucguacagaagcuaauacgacucacuauagggaaauaagagagaaaagaagaguaagaagaaauauaagagccacc

SEQ ID NO: 240 - protein, 4 aa, Artificial Sequence
  Synthetic Polypeptide
GGGS

SEQ ID NO: 241 - protein, 20 aa, Artificial Sequence
  Synthetic Polypeptide
  MISC_FEATURE (9)..(20): may be absent
GGGSGGGSGGGSGGGSGGGS

SEQ ID NO: 242 - protein, 25 aa, Artificial Sequence
  Synthetic Polypeptide
GSGVKQTLNFDLLKLAGDVESNPGP

SEQ ID NO: 243 - protein, 21 aa, Artificial Sequence
  Synthetic Polypeptide
GSGEGRGSLLTCGDVEENPGP

SEQ ID NO: 244 - protein, 22 aa, Artificial Sequence
  Synthetic Polypeptide
GSGATNFSLLKQAGDVEENPGP

SEQ ID NO: 245 - protein, 23 aa, Artificial Sequence
  Synthetic Polypeptide
GSGQCTNYALLKLAGDVESNPGP

SEQ ID NO: 246 - RNA, 66 nt, Artificial Sequence
  Synthetic Polynucleotide
ggaagcggagcuacuaacuucagccugcugaagcaggcuggagacguggaggagaacccuggaccu

SEQ ID NO: 247 - DNA, 108 bp, Artificial Sequence
  Synthetic Polynucleotide
uccggacucagauccggggaucucaaaauugucgcuccugucaaacaaacucuuaacuuugauuuacucaaacuggctggggauguagaaagcaauccaggtccacuc

SEQ ID NO: 248 - RNA, 9 nt, Artificial Sequence
  Synthetic Polynucleotide
  misc_feature (3)..(3): n is a or g
ccnccaugg

SEQ ID NO: 249 - RNA, 3852 nt, Artificial Sequence; identical to SEQ ID NO: 51
  Synthetic Polynucleotide

SEQ ID NO: 250 - RNA, 3837 nt, Artificial Sequence; identical to SEQ ID NO: 54
  Synthetic Polynucleotide

SEQ ID NO: 251 - RNA, 3837 nt, Artificial Sequence; identical to SEQ ID NO: 57
  Synthetic Polynucleotide

SEQ ID NO: 252 - RNA, 3861 nt, Artificial Sequence; identical to SEQ ID NO: 60
  Synthetic Polynucleotide

SEQ ID NO: 253 - RNA, 3837 nt, Artificial Sequence; identical to SEQ ID NO: 63
  Synthetic Polynucleotide

SEQ ID NO: 254 - RNA, 3837 nt, Artificial Sequence; identical to SEQ ID NO: 66
  Synthetic Polynucleotide

SEQ ID NO: 255 - RNA, 3837 nt, Artificial Sequence; identical to SEQ ID NO: 54
  Synthetic Polynucleotide

SEQ ID NO: 256 - RNA, 3861 nt, Artificial Sequence; identical to SEQ ID NO: 60
  Synthetic Polynucleotide

SEQ ID NO: 257 - RNA, 3837 nt, Artificial Sequence; identical to SEQ ID NO: 63
  Synthetic Polynucleotide

SEQ ID NO: 258 - RNA, 3919 nt, Artificial Sequence
  Synthetic Polynucleotide
gggaaauaagagagaaaagaagaguaagaagaaauauaagagccaccaugagcaccgaacgggauagcgagaccaccuucgacgaggacucgcagcccaacgacgaggugguaccguacuccgacgacgagacugaagacgaacuggacgaccaggggagcgccguggagccggagcagaaucgggugaaccgggaggccgaggagaacagggagcccuuccgaaaggagugcaccuggcaggugaaagccaacgaucggaaguaccaugagcagccacacuucaugaacacaaaguuccuguguaucaaagaguccaaguacgccaauaaugcuaucaagaccuacaaguauaacgcguuuaccuucauccccaugaaccuuuucgagcaauuuaaaagagcugccaaucucuacuuucuggcccugcucauacuccaggccgugccccagaucuccacccuggccugguauaccacccuggugccccugcucgugguacugggcgugaccgccaucaaggaccucguggacgacguagcccgacacaagauggacaaggagaucaacaaccggacgugcgaggugaucaaggacggcagguucaaaguggccaaguggaaagagauccaggucggcgacgucauccgccugaagaagaacgacuucgugcccgccgacauccugcugcuauccuccagcgagcccaauagccucugcuauguggagaccgccgaacucgacggggaaaccaaccugaaguucaagaugagccuggagaucaccgaccaguaccugcagagagaggauacgcuggccaccuucgacggcuucaucgaaugcgaggagcccaacaacagacuggacaaguucaccgggacccuguucuggcggaacaccagcuucccgcuggacgcugacaagauccugcugcgcgguugugucaucaggaacaccgacuuuugccacggccuggugaucuucgcgggcgccgauaccaaaaucaugaaaaacucaggcaagacccgcuucaaaaggacuaagaucgacuaccugaugaacuacaugguguacaccaucuuuguggugcuaauccugcugagcgccggccucgcaaucggccacgccuacugggaagcacaggucgggaacagcagcugguaccuguacgacggagaggaugacacccccagcuaucgcggcuuccucaucuucuggggcuacaucauagugcugaacaccauggugccgaucagccuguacgucuccguggaggugauccgucugggccagucccauuuuaucaauugggaccugcaaauguauuaugccgagaaggauacccccgccaaggccaggaccaccacccuuaacgagcagcuuggccagauccacuacaucuucagcgacaagaccggcacgcugacccagaacauaaugaccuuuaagaagugcugcaucaacggccagaucuacggcgaccaccgugacgccucccagcacaaccacaacaagauugagcaggucgacuuuagcuggaacaccuacgccgacggcaagcuggccuucuacgaccacuaccugaucgagcagauccagucaggcaaggagcccgaggugcggcaguuuuucuuccugcucgccgugugucacaccgugaugguggacagaacggacgggcagcucaacuaccaggccgcgucgcccgacgaaggggcgcuggugaacgccgccaggaacuucggcuucgccuuccuggccaggacccaaaacaccaucaccauaagcgaacuuggcaccgagaggaccuacaacgugcuggccauccucgacuucaacuccgaccggaagaggaugagcaucauugugaggacccccgaagggaacaucaagcuguacugcaagggggccgacaccgucaucuacgagaggcugcaccggaugaaccccaccaagcaggaaacgcaggacgcgcucgacauauucgcaaacgagacccugaggacacuuugccugugcuacaaggagaucgaggaaaaggaguucaccgaguggaacaagaaguuuauggccgcauccguggccagcaccaaccgcgacgaagcccuggacaagguguacgaggagaucgaaaaggaucugauccuccugggagccaccgccaucgaggacaagcuccaggauggcgugccugagaccaucuccaaacuggccaaggccgauaucaagaucugggugcugaccggcgacaagaaggagaccgccgagaauaucggcuuugccugcgagcugcugaccgaggacacaaccaucugcuacggcgaggacaucaacagccugcugcacgccaggauggagaaccagcgcaaccgcggggggguguacgccaaguucgcgccccccgugcaggaaagcuucuucccccccggcgggaacagggcccugauuaucacgggcagcuggcugaacgagauacuccuggagaagaaaaccaaacggaacaaaauccugaagcucaaguuccccaggaccgaggaggagaggcggaugcggacccaguccaagcgucgccuggaggccaagaaggaacagcggcaaaagaauuucguggaccuggcgugcgaguguagcgccgucaucugcugccgggucaccccaaagcagaaggccauggugguggaccuggugaagagguacaagaaagccaucacccuggccaucggcgauggggccaacgacgucaacaugaucaagaccgcccacauuggcgucggcaucagcggccaagagggcaugcaggccgugaugagcagcgauuauagcuucgcccaguuccgcuacuuacaaaggcugcuccucgugcacggcagguggagcuacaucaggaugugcaaguuccuccgguacuucuuuuacaagaacuucgccuucacccuggugcacuuuugguacucauucuucaauggcuacagcgcccagacggccuacgaggacugguucaucacccuguacaacgugcucuauaccucccugccagugcuguugaugggccugcuggaucaggacgugagcgacaagcugucccugcguuuucccggacuguauaucguggggcagcgggaccugcuguucaacuacaaaagguuuuucgugucccugcuucacggcgugcucacuagcaugauccuguuuuucaucccccugggggccuaccugcagacggucgggcaggacggcgaggccccauccgacuaccaguccuuugccgugaccauagccagcgcccuugugauuacggucaacuuccagaucgggcucgauaccuccuacuggacguucgucaacgccuucagcaucuucggcagcaucgcccuguacuucgggaucauguucgacuuccacagcgcgggcauccacgugcuguucccauccgccuuccaguuuacgggcaccgccagcaaugcccugaggcagcccuacaucuggcugaccauaauccucgcaguggccgucugccuccuccccguaguggccaucagguuccugagcaugaccaucuggcccucggagagcgacaagauucagaagcacaggaagcggcugaaggccgaggagcaguggcagcgcaggcagcagguguucaggcggggcguuagcaccaggagauccgccuacgccuuuagccaucaacgaggcuaugccgaucugauaagcuccggacgcagcauuaggaagaaacgaagcccccuggacgccaucguggccgacggcaccgccgaauacaggcgaaccggcgacagcugauaauaggcuggagccucgguggccaugcuucuugccccuugggccuccccccagccccuccuccccuuccugcacccguacccccguggucuuugaauaaagucugagugggcggc

SEQ ID NO: 259 - RNA, 3919 nt, Artificial Sequence
  Synthetic Polynucleotide
gggaaauaagagagaaaagaagaguaagaagaaauauaagagccaccauguccaccgagcgagacagcgagaccaccuucgacgaggacucccagcccaacgacgagguggugcccuacagcgacgacgagaccgaggacgagcuggacgaccagggcuccgccguagagcccgaacagaacagggugaacagggaggccgaggagaaccgggagccguuucggaaagagugcaccuggcaggugaaggccaacgaucggaaguaccacgagcagccccacuucaugaacaccaaguuccugugcaucaaggagagcaaguacgccaacaacgcuauaaagaccuacaaauacaacgccuucaccuucauccccaugaaccuguucgaacaguucaagagggcagccaaccuguauuuccuggcccugcucauccuccaggccgugccgcagaucagcacacucgccugguacaccacccucgugccccugcucguggugcucggcgugaccgccauuaaggaucucguggaugauguggccaggcauaagauggacaaggagaucaacaacaggaccugcgaggucaucaaggacgggcgguuuaaggucgccaaguggaaggagauccaggucggugacgugauccggcugaaaaagaacgauuucgugccagccgacauccugcugcugagcagcagcgaacccaauagccucugcuacguggagaccgcggagcucgauggagagaccaaucugaaguucaagaugucacuggagauuaccgaccaguaccugcagagggaggacacccucgcgaccuucgauggcuucauagagugugaggagcccaacaacaggcuggacaaauucaccgggacccuguucuggcgaaacaccagcuucccccuggacgccgacaagauccugcugaggggcugcgugaucagaaacacagacuucugccaugggcuggucaucuucgccggcgcggacacgaaaaucaugaagaacuccggcaagaccagguuuaagcgaacgaagaucgacuaccugaugaacuacaugguguacacuaucuuugucguccugauccugcuuagcgccgggcuggcaaucggccacgcauauugggaggcccaggugggcaacuccagcugguaccuguacgacggcgaggacgacacccccagcuaccgcggcuuccugauauucuggggcuacaucaucgugcugaauaccauggugcccauuucccucuacgugagcguggaagugaucaggcugggacagagccacuucaucaauugggaccugcagauguacuaugccgaaaaggacacccccgccaaagcccggaccaccacccugaacgagcaacugggacaaauccacuacaucuuuagcgauaaaacgggaacccugacccagaacaucaugaccuucaaaaagugcugcauaaacggccagauuuacggagaucaccgcgacgccucccaacacaaccacaacaagauugagcagguggauuucuccuggaauaccuacgccgacgggaagcucgccuucuacgaccacuaccugaucgagcagauccagagcggcaaggagcccgaggugcggcaguucuucuuccugcuggccgugugccauaccgugaugguggacaggaccgauggccagcugaacuaccaggccgcaagccccgacgagggggcccuggugaacgccgcgcguaauuuuggcuucgccuuccucgcgaggacccagaacaccaucaccaucagugagcugggcaccgaaaggaccuacaacgugcuggccauccuggacuucaacucggaccgcaagaggauguccaucaucgucagaacccccgaggggaacaucaaacuguacugcaagggggccgacaccgugaucuaugagcgccugcaccggaugaaccccacuaaacaggagacccaggacgcccuggacaucuucgccaacgagacccugcggacccugugccugugcuauaaagagaucgaggagaaggaauucacggaguggaacaaaaaguucauggccgccagcguggccuccaccaacagggacgaggcccuggacaaaguguacgaggagaucgagaaggaccugauacuguuaggggccacggccauagaggacaaacugcaagauggcgugcccgagaccaucagcaagcuggcgaaggcagacaucaagaucuggguccugaccggcgacaagaaggagacggccgagaacaucggcuucgccugcgagcugcucaccgaggacaccaccaucuguuacggcgaggacaucaauagccugcuccaugccaggauggagaaccagcgcaacaggggcggcguguacgcgaaauucgccccccccgugcaggagagcuucuuccccccgggcgggaacagggcccugaucauaaccgguagcuggcugaacgagauccugcuggagaagaagaccaagcgcaauaagauccugaaacucaaguuccccaggaccgaggaggaaaggaggaugcggacccagaguaaaaggcgccuggaagccaagaaagagcagaggcagaaaaacuucguggaucuggccugcgagugcagcgccgugaucugcuguagggugacccccaagcagaaggccauggugguagaccuggugaagagguacaaaaaggccaucacccuggccaucggggacggcgcgaacgacgucaacaugaucaagaccgcccacaucggcgucgggaucagcgggcaagaaggcaugcaggccgugauguccagcgacuacagcuucgcccaauucagguauuuacagaggcugcuccuagugcacggucggugguccuacauaaggaugugcaaguuccugagguauuucuucuacaagaacuucgcauucacccuggugcacuuuugguacagcuucuucaacggcuacagcgcccagaccgccuacgaggacugguucaucacgcuguacaauguccuguauaccagccugcccgugcugcucaugggccugcucgaccaggacgugagcgauaagcucagccugagguuccccggccuguacaucgugggccagagggaucuccuguucaacuacaagcgguucuuugucagccuccugcacggcgugcugaccagcaugauccucuucuucaucccccugggcgccuaucugcagaccgugggccaggacggggaggccccgucagacuaucagagcuucgcagugaccaucgccagcgcccuggugaucaccgugaacuuccagaucggccuggacaccagcuacuggaccuuugugaacgccuuuagcaucuucgggagcaucgcccuguacuucgguaucauguucgauuuccacagcgccggcauacacgugcucuuucccuccgccuuccaguucaccggcaccgccagcaacgcgcugaggcagcccuacaucuggcugacaaucauccuggccgucgccgugugccugcugcccgugguggccauccgguuccugagcaugaccauuuggcccucggagagcgacaagauccaaaagcacaggaagcggcugaaagccgaggagcaauggcagcggcgacagcaggucuuccgcagggggguguccaccaggcggagcgccuacgccuuuucgcaccagcgcggcuacgccgaccucaucagcagcggacggucgauucgcaagaagaggagcccccuagaugccaucguggccgacgggaccgccgaguacaggcggaccggugacagcugauaauaggcuggagccucgguggccaugcuucuugccccuugggccuccccccagccccuccuccccuuccugcacccguacccccguggucuuugaauaaagucugagugggcggc

SEQ ID NO: 260 - RNA, 3919 nt, Artificial Sequence
  Synthetic Polynucleotide
gggaaauaagagagaaaagaagaguaagaagaaauauaagagccaccauguccaccgaaagggacagcgagaccaccuuugacgaagauagccaacccaacgacgaggugguacccuacuccgacgacgagaccgaggacgagcuggacgaccagggcuccgcgguugaacccgaacagaaccgggucaacagggaagccgaggaaaaucgcgagcccuucaggaaggagugcaccuggcaggugaaggccaacgacaggaaguaccacgagcagccccacuucaugaauaccaaguuccugugcaucaaggaaagcaaguacgccaacaacgccaucaagacguacaaguauaacgccuucaccuucauucccaugaaccuguucgagcaauucaagagggccgcgaaucuguacuuccucgcccugcugauccugcaagcggugccccagaucagcacacuggccugguacaccacccuggucccccuccugguggugcugggggucaccgccaucaaagaccucguggaugacgucgcgcggcauaagauggacaaagagaucaauaauaggaccugcgaggugaucaaggauggcagguuuaaggucgccaaauggaaggagauccaggugggcgacgugaucaggcugaaaaagaaugacuucguccccgccgauauccugcuccuguccagcagcgagcccaacagccugugcuacguggagacggccgaacucgacggcgagaccaaccugaaauucaagaugagccucgagaucaccgaccaguaccuccagcgggaagacacccuggccacguucgacggcuuuauagagugcgaggagcccaacaaccgccuggacaaguuuacuggcacacuguuuuggcggaacaccuccuucccgcuggaugccgacaagauccuccugaggggcugcgugaucaggaacaccgacuucugccacggccucgugaucuucgcgggcgccgacaccaagaucaugaagaacagcggaaagaccagguucaagaggaccaagaucgacuaccucaugaacuacauggucuacaccaucuucguugugcuuauccugcugucggccggccuggccaucggccacgccuacugggaggcccaggucgggaacagcagcugguaucucuacgacggcgaggacgacacccccagcuaucgcggcuuccugaucuuuuggggcuacaucaucguccugaacaccauggugcccaucucacuguacgugagcgucgaggugaucaggcuggggcagucccacuucaucaacugggaucugcagauguacuacgccgagaaggacacccccgcgaaggccaggacgaccacccugaaugagcagcugggucagauccacuacaucuucagcgacaagaccgggacgcugacccagaacaucaugaccuucaagaagugcugcauaaacggccagaucuacggcgaccaccgggacgccagccagcacaaccauaacaagaucgagcaggucgacuucuccuggaauaccuacgccgauggcaagcuggccuucuacgaccacuaccugaucgaacagauacagagcgggaaggaacccgaagugaggcaguucuucuuccugcuggccguaugccacacagugaugguggacaggaccgacggccagcucaacuaucaagcggccagccccgacgagggcgcucucguaaacgccgccaggaacuucggcuucgccuuccucgccaggacccagaacaccauuaccauauccgagcucggaaccgagcggaccuauaacguucuggccauccuggacuucaacagcgacaggaagcguaugagcaucaucgucaggaccccagaaggcaacaucaagcuguacugcaagggggccgauaccgugaucuacgagaggcugcaccggaugaaccccaccaagcaggaaacccaggacgcccuggacaucuucgccaacgaaacgcugcggacccugugccucugcuacaaagagaucgaggagaaggaguucaccgaguggaacaagaaguuuauggccgccagcguggccagcacaaaucgggacgaggcccuggacaaggucuacgaggagaucgagaaagacuugauccugcugggcgccacggcaaucgaggacaagcuacaggacggcguccccgagaccauaagcaagcuggccaaagccgacaucaagaucuggguccugaccggagacaagaaagagaccgccgaaaacaucggauucgccugcgagcuucucaccgaggacacgaccaucugcuacggcgaggacaucaacucccugcugcacgccaggauggagaaccagaggaacaggggcggcguguacgccaaguuugccccucccgugcaggagagcuucuuuccccccgggggcaacagggcccugaucaucaccgggagcuggcucaacgaaauccugcuggagaagaagaccaagaggaauaagauccugaagcucaaguucccgaggaccgaagaggagaggcgcaugcgaacgcaguccaagcggaggcuggaggccaagaaggagcagaggcagaaaaacuuuguggaccucgccugcgaaugcagcgccgugaucugcugucgcgucacgcccaagcaaaaggccaugguugucgaccuggugaagagguacaagaaggccauaacccuggcaaucggcgauggcgccaacgacgugaacaugaucaagacagcccacaucggcguggggaucagcggccaagagggcaugcaggccguuaugagcagcgacuacagcuucgcgcaguucagguaccugcagcgccugcugcuggugcacggaagguggagcuacaucaggaugugcaaguuucugcgcuauuuuuuuuacaagaacuucgcguuuacccuggugcauuuuugguacuccuuuuuuaacggcuacucagcccagacugccuaugaggacugguuuaucacccucuacaacgugcuauauacgagcuugcccgugcugcugaugggccugcuggaccaggacguaagcgacaagcugagccuccgcuuccccggccuguacaucgugggucagagggaccugcuguucaacuacaagagguuuuuugugagccugcugcaugggguguugaccuccaugauacuguucuucaucccccugggggccuaccugcagaccgugggccaagauggcgaggccccuucggacuaccagucguucgcgguuacgauugccuccgcucuggugaucaccgugaacuuccagaucggucuggacaccagcuacuggaccuucgugaaugccuucagcaucuucggguccaucgcccucuauuucggcaucauguucgacuuccacuccgcgggcauccacgugcucuuuccuuccgccuuccaguucaccggcaccgccuccaacgcgcugaggcagcccuacaucuggcugaccaucauccuggccgucgccguaugccugcugcccgugguggccauccgcuuccuguccaugaccaucuggcccagcgaguccgauaagauccagaagcacaggaagaggcugaaggcagaggaacaauggcaaaggaggcagcagguguuccggaggggggugagcacccggaggagcgccuacgcguucagccaucaaaggggcuacgccgaccugauuagcuccggccgcucgauccgcaagaagaggagcccccuggacgcgaucgucgccgacggcaccgccgaguauaggcguaccggcgacagcugauaauaggcuggagccucgguggccaugcuucuugccccuugggccuccccccagccccuccuccccuuccugcacccguacccccguggucuuugaauaaagucugagugggcggc

SEQ ID NO: 261 - RNA, 3919 nt, Artificial Sequence
  Synthetic Polynucleotide
gggaaauaagagagaaaagaagaguaagaagaaauauaagagccaccaugucgacagagcgggauagcgaaaccaccuucgacgaggauucccagccgaacgacgaaguggugccguacagcgacgacgagaccgaggacgagcuggacgaccaaggcuccgccgucgagcccgagcagaacagggugaaccgcgaggccgaggagaaccgggagcccuuuaggaaggaauguacguggcaggugaaggccaaugaucggaaguaccaugaacagccgcacuuuaugaacacuaaguuccugugcaucaaggagagcaaguaugccaacaaugccaucaagaccuacaaguacaacgccuucacauuuauccccaugaaucuguucgagcaguuuaagcgagccgccaaccuguacuuccuggcccuccugauauugcaggccgugccccagaucagcacccucgccugguacaccacccuggugccccugcugguggugcugggcguuaccgccaucaaggaccugguggacgauguggcccgacacaagauggacaaggagaucaacaaccgcacgugcgaggugaucaaggauggccgcuucaagguggccaaguggaaggagauccaggugggcgaugugaucaggcugaaaaagaaugauuuugugccggccgauauccugcugcuguccuccagcgagcccaacucccugugcuauguggagaccgcggagcucgacggcgagaccaaccugaaguuuaagaugucccuggaaaucaccgaccaauaccugcaacgggaggacacccuggccaccuucgacggauucaucgagugcgaggagccgaacaauaggcuggauaaguucaccgggacccuguucuggcgaaacaccuccuucccccuggacgccgacaagauccugcugaggggaugcgugaucaggaacacagacuucugucacgggcucgugaucuucgccggggccgacaccaagaucaugaaaaacuccggcaagaccagguucaaaaggaccaagaucgacuaccugaugaacuacaugguuuacaccaucuuuguggugcugauccugcuauccgccggccuggccaucgggcaugccuacugggaagcucagguggggaacagcagcugguaccuguacgacggggaagacgacacccccagcuaccgcggcuuccugaucuucuggggcuacaucaucguacucaacacuauggugcccaucagccuguacgugagcguggaagugaucaggcugggccagagccacuuuaucaacugggaccugcagauguacuacgccgagaaagauacccccgccaaggccaggaccaccacccugaacgagcagcugggccaaauccacuacaucuucagcgacaagaccgggacccucacccagaacaucaugaccuucaagaagugcugcaucaauggccagaucuacggggaccaccgcgacgccagccagcacaaccacaacaagaucgagcagguggacuucagcuggaacacguacgccgacggcaagcuggccuuuuacgaccacuaucugaucgagcagauccagagcggcaaagaacccgaggugagacaguuuuucuuccugcuggccguuugccacaccgugauggucgauaggaccgacggccagcugaacuaccaggccgccucccccgacgagggggcccuggugaacgccgccaggaauuuuggcuuugcguuucuggccaggacccagaacaccaucaccaucagugagcuggggaccgagaggacauauaacgugcuggccauccucgacuuuaacagcgacaggaagaggaugagcaucaucgugaggacccccgagggaaauaucaaacucuacuguaagggagccgacaccgugaucuacgagcggcugcaucguaugaaccccaccaagcaggagacccaggacgcccuggacaucuucgccaacgagacccugcgcacccugugccugugcuacaaggagaucgaggagaaggaguucaccgaguggaacaagaaguucauggccgccucaguggcgagcaccaacagggacgaggcgcuggacaagguguacgaggagaucgaaaaggaccugauccugcugggcgcuaccgccauagaggacaagcugcaggauggcgugcccgagaccaucuccaaacuggccaaggcggacaucaagauuugggugcugaccggggauaagaaggagaccgcugagaacauaggcuucgccugcgaacugcugaccgaggacacgaccaucuguuacggggaggacauuaacagccugcugcaugccaggauggaaaaucagcggaauaggggcggcguguacgcaaaguucgccccccccgugcaggaguccuucuucccccccgggggcaacagggcgcugaucaucaccgggagcuggcucaacgagauccugcuggagaagaagaccaagaggaacaagauucucaagcucaaauuccccaggacggaggaagagcggcgcaugaggacccagagcaaaaggaggcucgaggccaagaaagagcagcgucagaagaacuuugucgaccuggccugcgaaugcagcgccguuaucugcugucgggugacccccaagcaaaaggccaugguggucgaccucgugaagagguacaagaaggcgaucacgcucgccaucggcgauggcgccaacgacgugaacaugaucaagaccgcccacaucggcgugggcaucagcggccaggaggggaugcaagccgugaugucguccgauuacucguucgcgcaguucagguaucuccagaggcugcugcugguccacgggcgcuggagcuauaucaggaugugcaaguuuuuacgguauuucuucuacaaaaacuuugccuucacccugguccacuucugguacagcuuuuucaacggcuacagcgcccagaccgccuacgaggauugguucaucacccuguacaacgugcuguacaccagccugccagugcugcugaugggucuccuggaccaggacguguccgacaagcugucccugcgguucccgggccuguacauugugggccaaagagaccuccuguucaacuauaagagguucuucgugucccugcugcacggcgugcugacuuccaugauccucuuuuuuaucccccugggggccuaccugcagaccguaggacaagacggggaggccccguccgauuaucaguccuucgccgugacgaucgccagcgcccuggugaucacggugaacuuccaaaucggccucgacaccucuuacuggaccuucgugaacgccuucuccaucuuugguagcaucgcccuguacuuuggcauuauguucgacuuccacuccgccggcauccaugugcuguuccccagcgccuuccaguucacgggcaccgccuccaacgcccucaggcagcccuacaucuggcugaccaucauccuggccguggcagugugccugcuccccgugguggcgauccgguuccugagcaugaccaucuggcccuccgaaagcgauaagauccagaaacacaggaagaggcugaaggccgaggagcaauggcagaggaggcagcagguguucaggagaggcgugagcaccaggcgaagcgccuacgccuucagccaccagaggggguacgccgaccugauaagcagcggccggagcaucaggaagaagagguccccccuggacgccaucguggcggacgggaccgccgaguaccggaggaccggggacagcugauaauaggcuggagccucgguggccaugcuucuugccccuugggccuccccccagccccuccuccccuuccugcacccguacccccguggucuuugaauaaagucugagugggcggc

SEQ ID NO: 262 - RNA, 3919 nt, Artificial Sequence
  Synthetic Polynucleotide
gggaaauaagagagaaaagaagaguaagaagaaauauaagagccaccaugagcaccgagagggacuccgagaccaccuuugacgaggacagccaacccaacgacgagguggugcccuacagcgacgacgagaccgaggacgagcuggacgaccagggcagcgccguggagccggagcagaaccgggugaacagggaggccgaggagaauagggaacccuuccgaaaagaguguaccuggcaagugaaggccaacgaccgaaaauaccacgagcaaccccacuucaugaacaccaaguuccugugcaucaaggaguccaaguacgccaacaacgcaauaaaaaccuacaaauacaacgccuuuaccuucauccccaugaaccuguucgagcaguucaagcgcgccgcgaaucuuuacuuucuggcccuccugauccugcaggccgucccccagaucagcacacucgccugguacaccacgcuggugccccugcucguggugcucggagugaccgccaucaaggaucugguggacgacguugccagacacaagauggacaaggagauuaacaacaggacgugcgaggugaucaaggacgguagguucaagguggcaaaguggaaggaaauucaggugggcgacgugauucgccugaagaagaacgauuucgugccggccgacauacuccugcucagcagcuccgagccgaauagccugugcuacguggagacggccgagcucgacggagagaccaaccugaaguucaagaugucccuggaaaucaccgaucaguaucugcaaagggaggacacccuggccaccuucgauggcuucaucgagugcgaggagcccaacaaccgacuggacaaguucaccggcacccuguucuggcggaacaccagcuucccccucgacgcggacaagauccugcuccgggggugcgucauccggaacaccgacuucugccauggccuggugaucuucgccggggccgacaccaagaucaugaagaacagcgggaagacccgguucaagaggacgaagaucgacuaccucaugaacuacaugguguacaccaucuucguggugcugauccugcuguccgccggccuggccaucggccaugccuacugggaggcgcaggugggcaauagcucgugguaccucuacgacggcgaggacgauacccccaguuacaggggguuucugaucuucuggggcuacaucauugugcugaacaccaugguccccaucucccuguacgucagcguggaagugauccgccucggccagucacacuucaucaacugggaccugcagauguauuacgccgagaaagacaccccggcgaaggcccgcaccaccacccuuaacgagcaacugggucagauccacuacaucuuuagcgacaagaccggaacccucacccagaacaucaugaccuuuaagaagugcugcaucaacggccagaucuacggagaucaccgcgacgccucccagcacaaccacaacaaaaucgagcagguggacuucagcuggaauaccuacgccgacggcaagcucgccuucuacgaccauuaccugaucgagcagauccaguccggcaaggagcccgaggugcgacaauucuuuuuucugcuggccguuugccacaccgugauggucgauaggaccgacgggcagcucaauuaccaagccgccucccccgaugagggcgcccuagugaacgccgcccggaacuucggcuucgccuuccuggcacgcacccagaacacuaucaccauuuccgaacucggcaccgagcggaccuacaaugugcuggccauccuggacuucaacagcgacaggaagaggaugagcaucaucgugaggacccccgaggggaacauaaaacuguacugcaagggcgcagacaccgugaucuaugaacgccugcacaggaugaaccccaccaagcaggagacgcaggacgcccucgacaucuucgcgaacgagacccugcguacccucugccucugcuacaaagagaucgaagagaaggaguucaccgaguggaacaagaaguucauggccgcgagcguggccagcaccaacagggacgaggcccuggacaagguguacgaggaaauugagaaagaccugauccugcucggcgccaccgccaucgaggauaagcugcaagacggggugcccgaaacaauaagcaagcuggccaaagccgauaucaagauauggguccugacuggugacaagaaggagaccgccgaaaacaucggguuugccugcgagcugcucaccgaagacacaaccaucugcuacggcgaggauaucaacucgcugcugcacgcccgcauggagaaccagcgcaaccgugggggcguguaugccaaguucgccccccccgugcaagagagcuucuucccgcccggcgguaaccgggcccugauaaucaccggcagcuggcugaacgagauccugcuggagaaaaaaaccaagaggaacaagauccugaagcugaaguucccgcggaccgaagaggagaggcguaugcgcacccagagcaaaaggaggcuggaggccaagaaggaacagcgccagaaaaacuucguggaccuagccugcgagugcuccgccgugaucugcugccgcgucacccccaagcagaaggccauggugguggaccuggugaagagguacaagaaggccaucacucucgccaucggugacggggccaacgacgugaacaugaucaagaccgcccacaucggcgugggcaucagcggccaggagggcaugcaagccguuaugagcucugacuacagcuucgcccaguucagguaccuccaacggcugcugcuggugcacgggcgguggagcuacaucaggauguguaaguuccugagguacuucuucuacaagaauuucgccuucacccuggugcacuucugguacagcuucuucaauggcuacagcgcccagaccgccuacgaggauugguucaucacccucuacaacgugcuguacaccagccugccgguccugcugaugggccugcuagaccaggacgugagcgacaagcugagccugagguuucccgggcucuacaucgugggccagcgcgaccuccuguuuaacuauaagcgcuucuucgucagccugcuccacggcguccugaccagcaugauccuguucuucaucccccuaggggccuaccuccagaccgugggucaagacggggaggcccccagcgauuaccagagcuucgccgugaccauagcguccgcccuggugauaaccgugaacuuccagaucggccucgacaccucguacuggaccuucgucaacgccuucagcaucuucggcagcaucgcccucuacuucgggauaauguucgacuuccacuccgccggcauccacgugcuguuccccagugccuuccaauucaccgggaccgccagcaacgcccugcggcagcccuacaucuggcugaccauuauccuggccguggccgugugccugcugcccgucgucgccauccgguuccuuagcaugacgauauggcccagcgagagcgacaaaauccagaagcauagaaagcggcugaaagccgaggagcaguggcaaaggcggcagcaaguguuccggcgaggcgucagcacccggaggagcgccuacgccuucagccaccagagaggguacgccgaucugaucuccagcggccggagcauaaggaagaaaagguccccgcuggacgccaucguggcagacggcaccgccgaguacaggcggaccggggacuccugauaauaggcuggagccucgguggccaugcuucuugccccuugggccuccccccagccccuccuccccuuccugcacccguacccccguggucuuugaauaaagucugagugggcggc

SEQ ID NO: 263 - RNA, 3919 nt, Artificial Sequence
  Synthetic Polynucleotide
gggaaauaagagagaaaagaagaguaagaagaaauauaagagccaccauguccaccgagcgggacuccgagaccaccuucgacgaggacagccagcccaacgacgaggugguccccuauagcgacgacgagaccgaggacgagcuggacgaccagggauccgccguggagcccgagcagaaccgugugaaccgggaggccgaggagaaccgugaacccuuccgcaaagagugcaccuggcaggugaaggccaacgacaggaaguaucacgaacagccccauuucaugaacacaaaguuccucuguaucaaggagagcaaguacgccaacaacgccaucaaaaccuauaaguacaacgccuucacauucauccccaugaaccuguuugaacaguucaagagggccgccaaccuguacuuccuggcacugcugauccugcaggccgucccccagaucagcacacucgccugguacaccacccuggugccccugcugguggugcugggcgucacagccaucaaggaccugguggacgauguagccaggcacaagauggacaaggaaaucaacaauaggaccugcgaggugaucaaggacgggagguucaaaguggccaaguggaaggagauccaggugggggaugugauccgccugaagaagaacgacuucgugcccgccgacauccugcugcugucgucgagcgagcccaacucccugugcuacguggaaaccgccgagcuggacggcgagaccaaccucaaguucaagaugagccuggagaucaccgaucaguaccugcagagggaggacacccuggccaccuucgacggcuucaucgagugcgaagagccaaacaaccggcuggacaaguucaccggcacccuguucuggaggaacacgagcuucccccuggaugccgacaagauccugcugaggggaugcgugauccgcaauaccgacuucugccacgggcuggugaucuuugccggcgcggacaccaagauaaugaagaauagcggcaagaccagauucaagaggaccaaaaucgauuaccucaugaauuacaugguguauaccaucuucguggugcugauccugcugagugccggccuggcgaucggccacgccuauugggaggcccagguugguaacagcuccugguaccucuacgacggugaggacgacaccccguccuacaggggguuccugaucuuuuggggguacaucaucgugcugaacaccauggugccaauaagccuguacgucucgguggaggugaucaggcuggggcaaagccacuucaucaauugggaccugcaaauguacuaugccgagaaagacaccccggccaaggccaggaccaccacccugaacgagcagcuggggcagauccacuacaucuuuuccgacaagacggggacgcugacccagaauaucaugacguucaagaaaugcugcaucaacggccagaucuacggggaccacagggacgccagccagcacaaccauaacaagaucgagcaaguggauuucagcuggaauaccuacgccgaugggaagcuggccuucuacgaccacuaccugaucgagcagauccaaucgggcaaggagcccgaggugcggcaauucuuuuuccugcuagccgugugccacaccgugaugguggacaggaccgacggccaacugaacuaccaagccgcaucccccgacgagggagcccuggugaacgccgcccggaacuucggcuucgcguuucuggcgcggacccagaacaccaucacgaucagcgaacugggcaccgagaggaccuacaacgugcuggccauccuggacuucaacagcgaccgaaagaggaugagcaucaucgugaggacccccgagggcaacaucaagcuguacugcaagggggccgauaccgucaucuacgagagacugcaccgaaugaaucccaccaagcaggaaacccaagacgcccuggacaucuucgccaacgaaacccugaggacgcugugccugugcuacaaggagaucgaggagaaggaguucaccgaguggaacaaaaaguucauggccgcuuccguggccagcaccaaccgcgacgaggcccuggacaaaguguacgaggagaucgagaaggaccugauccuccugggcgccaccgccaucgaggauaagcuccaggacggcguucccgagaccauuuccaagcuggccaaggccgacauaaagaucugggugcuuacgggcgacaagaaggagacggccgagaauaucggcuucgccugcgagcuccugaccgaggacaccaccaucugcuacggcgaggacaucaauagccugcugcaugcgaggauggagaaccagaggaaucgaggcgggguguacgcuaaguuugccccccccguccaggaaagcuuuuucccucccggcgggaacagggcccucauaauaaccggcuccuggcugaacgagauccuccucgagaagaagaccaagcgcaacaaaauccugaagcugaaguucccccggaccgaggaggaacgccggaugaggacucagagcaagcgaagacuggaggccaagaaggagcagaggcagaagaacuuuguggaccuggccugugagugcucugccgugaucuguugccgggucacccccaagcagaaagccaugguggucgaccuggugaagcgguacaagaaagcuaucacccuggccaucggggacggcgccaacgacgugaauaugaucaagaccgcgcacaucggcgugggcaucagcggccaagagggcaugcaggccgucaugagcagcgacuacucguucgcccaguuccgcuaccugcagcggcuacuccuggugcacggcaggugguccuauaucagaaugugcaaguuucugagguacuucuuuuacaagaacuucgccuucacccuggugcacuucugguacucguucuucaacggcuacagcgcccagacggccuacgaagacugguuuaucacccucuacaacguucuguacaccagccugccggugcuccuuaugggccugcuggaccaagacgugucggacaagcugagccugagauucccgggucuguacaucgugggucaaagggaccugcucuuuaacuacaagagguucuuugugagccugcugcacggaguccugaccagcaugauccuguucuuuaucccccucggcgccuaucuccaaacaguaggccaggauggagaggcccccagugacuaccagagcuucgccgugaccaucgcgagcgcccuggugaucaccgucaacuuccagaucggccucgacaccuccuacuggaccuucgugaacgccuucagcaucuucgggagcaucgcccuguacuucggcaucauguucgacuuccacuccgcggggauccacgugcuguuccccagcgcguuccaguucaccggaaccgccagcaacgcgcugaggcagcccuacaucuggcugaccaucauccuggcaguggccgugugccugcucccugugguggccaucagguuccugucgaugacaauauggcccagugaguccgacaagauccagaagcacaggaagcgucugaaggccgaggaacaguggcagaggaggcagcaggucuuccggagaggcguguccacccggaggagcgccuaugcguucucccaccagcgaggcuacgccgacuugaucuccagcgggagguccauccgcaagaaacggagcccacuggacgccaucguggccgauggcaccgccgaguacaggcgcaccggcgacuccugauaauaggcuggagccucgguggccaugcuucuugccccuugggccuccccccagccccuccuccccuuccugcacccguacccccguggucuuugaauaaagucugagugggcggc

SEQ ID NO: 264 - RNA, 3919 nt, Artificial Sequence
  Synthetic Polynucleotide
gggaaauaagagagaaaagaagaguaagaagaaauauaagagccaccaugagcaccgagagggacagcgaaaccaccuuugacgaggacucccagcccaacgacgaggucgugccguacagcgacgacgagaccgaagacgagcuggacgaccagggcuccgccgucgagcccgagcagaacagggucaaccgggaagccgaggagaaccgggagcccuuucggaaggagugcaccuggcaggucaaggccaacgaucgcaaguaccacgaacagccucacuucaugaacaccaaauuccuguguaucaaagagucaaaguacgcgaacaacgccaucaagaccuacaaguacaacgcguucaccuucauucccaugaaccuguucgagcaguuuaagagggccgccaaccuuuacuuccuggcccugcugauccugcaggccgugccccagaucagcacccuggccugguacaccacccucgugccccugcuggucgugcugggcgucaccgccauuaaggaucugguggacgacguggccaggcacaagauggacaaagaaauuaacaacaggaccugugaggucaucaaggacggcagguucaagguggccaaguggaaggagauccaagugggcgacguaauccggcugaagaagaacgauuucguccccgccgacauccugcuccugagcagcucggagcccaacucccugugcuacgucgagaccgccgagcuggacggcgagaccaaccugaaguucaagaugagccuggagaucaccgaccaguaccuccagagggaggacacgcuggccaccuucgacggauucauagagugcgaggagcccaacaacaggcuggacaaguucaccggcacccucuucuggaggaacaccagcuucccccucgacgccgacaagauccugcugagaggcugugugauccggaauaccgacuucugucacggccucguaaucuucgccggcgccgacaccaagaucaugaagaacagcgggaagaccagguucaagcggacaaagaucgacuaccugaugaacuacauggucuacaccauauucguggugcugauacugcuguccgccggccuggccaucggccaugccuauugggaggcacaggugggcaacagcuccugguaccuguacgauggugaggaugauacccccagcuauaggggcuuccugaucuuuuggggguacauaaucgugcugaacaccauggugcccaucucccuguacguuuccguggaggucauucgccugggccagagccacuucaucaacugggaccugcagauguacuacgccgagaaggauacccccgccaaggcacggaccaccacccugaacgagcagcugggccagauacacuauaucuuuucggacaaaaccggcacccugacccagaacaucaugaccuucaagaaaugcugcaucaauggacagaucuauggcgaccaccgcgacgccucgcagcauaaucacaacaagaucgagcagguggacuucagcuggaacaccuacgccgauggcaagcuggcguucuacgaucacuaccugaucgagcagauccagagcgggaaggagccagaggugcgccaguucuuuuuucugcuggccgucugccacaccgucaugguggacaggaccgacggccagcugaacuaucaggccgccagccccgacgagggggcccucgugaaugccgcccggaauuucggguucgccuuccuggccaggacccagaacaccaucaccaucagcgaacuggggaccgagcguaccuacaaugugcuggccauccuggacuucaacuccgauaggaaaaggaugagcaucaucgucaggacccccgaggggaacaucaagcuguauugcaagggcgccgacaccgugaucuacgaacggcugcacaggaugaaccccaccaagcaggagacccaagacgcccuggacauauucgccaacgagacccucaggacccugugucugugcuauaaggagauugaggagaaggaguucaccgaguggaacaagaaguucauggccgcgagcguggccagcacgaacagagacgaggcgcuggacaaagucuaugaggagaucgagaaggaccucauucugcugggcgccacagccauagaggacaagcugcaggacggcguccccgagaccaucagcaagcuugccaaagccgauaucaagaucugggugcugaccggcgauaagaaggaaacugcggagaacaucggguucgccugcgagcugcugaccgaggauaccaccaucugcuacggcgaggauaucaacucccugcugcacgcucgcauggagaaccaacggaacaggggcgguguguacgccaaguucgccccccccguccaggaguccuucuucccgcccggcggcaauagggcucugaucaucacgggauccuggcugaacgagauccugcuggaaaagaaaaccaagcggaauaagauccucaagcucaaguuccccaggaccgaggaggaacggaggaugaggacccaguccaaacggaggcuggaggccaaaaaagagcaacggcaaaagaacuucguggaccuggccugcgaaugcuccgccgucaucuguuguagggugacccccaagcaaaaagccauggucguggaucucguuaagcgcuauaaaaaagccaucacccuggccaucggcgacggcgccaacgacgugaacaugaucaagaccgcccacauuggggucgggaucuccggucaggagggcaugcaggccgugaugucauccgacuacucguucgcccaguuuagguaccugcagcggcugcuccuggugcacggccgcugguccuacauuaggaugugcaaguuucugagguacuuuuuuuacaaaaacuucgccuuuacccuggugcacuucugguacucauucuucaacggcuacuccgcccagaccgccuacgaagacugguuuaucacccuguacaacgugcuguacaccucccugccggugcugcugauggggcugcuggaucaggacgugagcgacaaacugagccugcgguuccccggccucuacaucgucggccagagggaccugcuguucaacuauaagagguucuucgugagccugcugcacggcgugcugaccagcaugauccucuuuuucaucccccugggcgcauaccugcagaccguggggcaggauggcgaggcccccuccgacuaccagagcuucgccgucaccaucgccucagcacucgugaucacagugaacuuucagaucggccuggacacguccuacuggacguucgugaaugccuucuccaucuucggguccauugcccuguacuucgguaucauguucgauuuccauagcgcgggcauccacgugcuguuccccagcgccuuccaguucaccggcaccgccagcaacgcccugaggcagcccuacaucuggcugaccaucauccuggcgguagccgugugccugcugcccgucguggccaucagguuucucagcaugaccaucuggcccuccgagagcgacaagauccagaaacacaggaagaggcugaaggccgaggaacaguggcaaaggaggcagcaaguguucaggcgcggggugucgaccaggcgcagcgccuacgccuuuucccaccagcgaggcuaugccgaucugaucagcagcggccgcagcaucaggaagaagcggagcccccuggaugccaucgucgcggacgggacagcggaguauaggaggacgggcgacucgugauaauaggcuggagccucgguggccaugcuucuugccccuugggccuccccccagccccuccuccccuuccugcacccguacccccguggucuuugaauaaagucugagugggcggc

SEQ ID NO: 265 - RNA, 3919 nt, Artificial Sequence
  Synthetic Polynucleotide
gggaaauaagagagaaaagaagaguaagaagaaauauaagagccaccaugaguaccgagcgggacuccgagaccacguucgacgaggacucccagcccaacgacgagguaguccccuauagcgacgacgaaaccgaggacgagcuggacgaccagggcagcgccguugagccagagcagaaucgggugaacagggaggcugaggagaacagggagcccuucaggaaggagugcacguggcaggucaaggccaacgacaggaaguaccacgagcagccgcacuucaugaacaccaaguuccuguguaucaaggagagcaaguacgccaacaacgcgaucaagacguauaaguacaacgcguucacauucaucccuaugaaccucuucgagcaguuuaaaagggccgccaaccuguacuuccucgcccuccugauccuccaggcagugccccagauauccacccucgccugguacaccacccuggugccccugcuggucguccugggcgucaccgcgaucaaagaccuggucgacgacguggccaggcacaaaauggacaaggagaucaacaaccgcacaugcgaggucauuaaggacggcagguucaagguggccaaguggaaggaaauccaagucggugaugugaucaggcugaagaagaacgauuucgugcccgccgacauccugcugcucagcaguagcgagccgaacagccugugcuacguggaaaccgccgagcucgacggcgagacgaaccugaaauucaagaugagccucgaaaucaccgaccaguaccuucagcgcgaagacacccuggccaccuucgacggguucaucgagugcgaagagccaaacaacaggcucgacaaguucaccggcacccucuucuggaggaauaccuccuuuccccuggacgcagacaaaauccugcugcgcggcugugugaucagaaacacggacuucugccacggccuggugaucuucgccggggccgacaccaagaucaugaagaauuccggcaagaccagguuuaagaggaccaaaaucgauuaccucaugaauuacaugguguacaccaucuuuguggugcugauccugcugagcgccggccuggcuaucggccacgccuacugggaggcccaggucggaaacuccagcugguaccucuacgacggcgaagacgauacccccagcuacaggggcuuccucaucuucuggggguacaucaucgugcugaacaccauggugccgaucucgcucuacgugagcgucgaggucauccggcuggggcagucccacuucaucaacugggaccugcagauguacuacgcugaaaaggauacccccgccaaagccaggaccacgacucugaaugagcagcucggccagauccacuauaucuucagcgacaagaccggcacccugacccagaacaucaugacguucaaaaaguguugcauaaauggccagaucuauggcgaccacagggacgccagccagcacaaccacaacaagaucgagcagguggacuucagcuggaacaccuaugccgacggcaagcuggccuucuacgaccacuaccugaucgagcaaauccagagcggcaaggaacccgaagugaggcaauucuucuuccugcucgccgugugccacaccgugauggucgaccggaccgacgggcagcugaacuaccaggccgccagccccgaugaaggggcccuggucaaugccgcccgcaauuucggcuucgcguuccuggccaggacccagaacaccaucacgaucuccgagcuggggaccgagaggaccuacaacgugcuggccauccuggacuucaacagcgacaggaaacggaugagcaucauuguccggacccccgagggcaauaucaaacuguacugcaagggcgcggacaccgucaucuacgagcgucugcaccgcaugaaccccaccaagcaggaaacgcaagacgcccuggauauauucgccaacgagaccuugaggacccugugccucugcuacaaggagaucgaggagaaggaguucaccgaguggaacaagaaguucauggccgccagcguagcaagcaccaauagggacgaggcccuggacaaggucuacgaggagaucgagaaggaucugauccuccugggcgcgacggccaucgaggacaaacugcaggacggagugcccgagaccaucuccaagcucgccaaggccgauaucaaaaucugggugcugaccggagacaagaaagagaccgccgagaacaucggguucgcgugcgagcugcugaccgaggacacaacgaucugcuacggcgaggacaucaacagccugcugcacgcgcgcauggagaaucagaggaaccgugggggcguguacgccaaguucgccccgccggugcaagaguccuucuucccgcccggcggcaacagggcccugauuaucaccggcagcuggcugaacgagauccugcuggagaagaagaccaaacggaacaagauccugaagcugaaguucccccggaccgaggaggagaggaggaugaggacgcaaagcaagcgccgccucgaagccaagaaggagcaaaggcagaagaacuucguggaccuggcgugcgagugcagcgccgugaucugcuguagggucacccccaagcagaaggccauggugguggaccuggugaagcgguacaagaaggccaucacgcuggccaucggggacggcgccaacgacgugaacaugaucaagacggcccauaucggcgugggcaucagcggccaggagggaaugcaggccgucaugagcuccgauuacuccuucgcccaguucagguaccuucagaggcugcuccuggugcacggccgguggagcuacauccgcaugugcaaguuccucagguacuucuucuacaagaacuucgccuuuacccuggugcacuuuugguacagcuucuucaacggcuacagcgcccagacggcguacgaggacugguuuaucacacuguauaacgugcuguacaccagccugcccgugcugcugaugggucugcuggaccaagaugugagcgacaagcugagcuugcgauuccccggccuguacauuguagggcagagggaccuccuguucaacuacaagagguuuuucguaagccugcugcacggcgugcugaccagcaugauccucuucuucauaccccugggagccuaccugcaaaccgucggccaggauggcgaagcgcccagcgacuaccagagcuucgcggugaccaucgccagcgcccuggugaucaccgucaacuuccaaauaggccuagacaccuccuacuggaccuucgugaacgccuucuccaucuucgguagcaucgcccuguacuucggcaucauguucgacuuccacuccgcgggcauccaugugcucuuccccagcgccuuccaguucaccgggaccgccucuaacgcccugaggcagccauacaucuggcugaccauaauccuggccguggccgucugccugcugcccguggucgccaucagguuccugucgaugaccaucuggcccagcgaguccgauaagauccagaagcacaggaaacgccuuaaagccgaggagcaguggcagcgcaggcagcagguuuuccggcgaggagugagcaccaggaggagcgcguacgccuucucacaccagcggggauaugcggaccugaucagcuccggccgcagcauccggaagaagaggagcccgcuggacgcgaucguggcggacggcacagccgaguaccguaggacaggcgacagcugauaauaggcuggagccucgguggccaugcuucuugccccuugggccuccccccagccccuccuccccuuccugcacccguacccccguggucuuugaauaaagucugagugggcggc

SEQ ID NO: 266 - RNA, 3919 nt, Artificial Sequence
  Synthetic Polynucleotide
gggaaauaagagagaaaagaagaguaagaagaaauauaagagccaccauguccaccgagcgggauagcgagacuaccuucgacgaggauucgcagcccaacgacgagguggugcccuacagcgacgacgagaccgaggacgagcuggacgaccagggguccgccgucgagcccgagcagaacagggugaacagggaagccgaagagaauagggagcccuucaggaaggagugcaccuggcaggugaaggccaacgacaggaaauaccacgagcagccccacuucaugaacaccaaguuccugugcaucaaagagagcaaguacgccaauaacgccaucaaaaccuacaaguacaacgccuucaccuuuauacccaugaaccuguuugagcaguucaagcgggccgcgaaccuguacuuccuggcccugcugauccuccaggccgucccccagauuagcacgcuggccugguauacgacccucgugccccugcugguggugcugggcgugaccgcgaucaaggaucucguggacgacguggccaggcacaagauggacaaggagaucaacaacaggaccugcgaggucaucaaagacgggagguucaaggucgccaaguggaaagaaauccagguaggcgacgugaucaggcugaagaagaacgacuuuguccccgccgacauacugcugcugucgagcagcgagcccaacagccugugcuacguggaaaccgccgagcuggauggggagaccaaccucaaguucaaaaugucccuggagaucaccgaccaguaccuccagagggaggacacccuggccaccuucgauggauuuaucgagugcgaggagccuaacaaccggcuggacaaguucaccggcacccuguucuggcgcaacaccuccuucccccuggacgcugacaagauccugcugcgggguugcgugaucaggaacacagacuucugccauggccuggugaucuuugccggcgccgacaccaagaucaugaagaacagcggcaagacccgguuuaagcggaccaagauagacuaccugaugaauuacaugguguacaccaucuuugucgugcugauacugcugagcgccgggcuggccaucggccacgcguacugggaggcccagguggguaauagcuccugguaccuguacgacggggaggacgacacccccaguuacaggggcuuccugaucuucuggggcuacaucauugugcugaacaccauggugcccauaucccuguacgugagcguggaggugaucaggcugggacagagccacuucaucaacugggaccugcagauguacuacgccgaaaaggacacgcccgccaaggcucggacgaccacgcugaacgaacagcugggccagauacacuacaucuucagcgacaagacgggcacccucacccagaacaucaugaccuucaagaagugcuguaucaacggccagauuuacggggaucacagggacgccucucagcacaaccacaacaagauagaacagguggauuuuagcuggaauacauacgccgacgggaagcuggccuucuacgaccacuaucugaucgagcagauccaaucgggcaaggaacccgagguuaggcaguucuucuuccuccuggccgucugccauacagugauggucgacaggaccgacggccagcugaacuaccaggccgccagccccgacgagggcgcccuggugaacgccgcccgcaacuuuggcuucgccuuucuggccaggacacagaacaccauaaccaucagcgaacucgggaccgagcggaccuacaacgugcuggccauccuggacuucaacagcgaucgaaagcggaugagcaucaucgugcggacccccgagggcaacaucaagcuguacuguaagggcgccgacaccgugaucuaugagcgucuccacaggaugaaucccaccaaacaggagacccaggacgcccuggacaucuucgccaacgaaacccucaggacccugugucugugcuacaaagagaucgaagaaaaagaauucaccgaauggaacaagaaguuuauggccgccagcguugccucaaccaacagggacgaggcccucgacaaaguguacgaggagaucgagaaggaccugauccugcugggcgccaccgccaucgaggauaagcuccaagauggggugccagagaccaucagcaagcucgccaaagccgacaucaagaucugggugcuaaccggagacaagaaggagaccgccgagaacaucggcuuugccugcgagcuccugacggaggauaccaccaucugcuacggggaggacaucaacagccugcugcacgcccgcauggagaaccagcgcaacaggggcggcguauaugccaaguucgccccgccugugcaggagagcuuuuucccccccggagggaaccgugcccucaucaucaccggguccuggcugaacgagauccugcuggagaagaagaccaagcggaacaagauccugaagcugaaguucccccgcaccgaagaagaacgccgcaugcggacucagagcaagaggaggcuggaggccaagaaagaacagcgccagaagaacuucguggaccuggccugcgaauguuccgccgugaucuguugcagggucacacccaagcagaaggccaugguggucgaccugguuaaacgguacaagaaggccaucacgcuggccaucggcgauggcgccaacgacguaaacaugauaaagaccgcccauaucggcgugggcaucuccggccaggaggggaugcaggccgugauguccuccgacuacagcuucgcccaguuuagguaccugcagagguuacugcuggugcacggcagguggagcuacaucaggauguguaaauuccugagguacuucuucuacaagaacuuugccuucacccuggugcacuucugguacuccuucuucaacggauacucagcccagaccgccuacgaggauugguucauaacccuguacaacgugcucuacaccagccugccggugcuccugaugggccuccuggaccaggacgucuccgacaaacugucccugagguuccccggccucuacaucgucgggcagcgggaccugcuguucaauuacaagagguucuucgugagccugcugcacgggguccugaccucgaugauccuguucuucaucccccucggugccuaccugcaaaccguaggccaggacggggaggcccccagcgauuaccagucguucgccgucaccaucgcgagcgcccuggugaucaccgucaacuuccagaucggucuggacaccagcuauuggaccuucgugaaugccuucagcaucuucgggagcaucgcccuguacuuuggcaucauguucgacuuccacagcgccggcauccaugugcucuuucccagcgcguuccaguucaccggcaccgccucaaacgcccugaggcagcccuauauuuggcugacuaucauccuggcgguggccgugugccuccugcccgugguggccauccgguuccugagcaugacgaucuggcccuccgagagcgacaagauucagaagcacaggaaacgccugaaggcggaagagcaauggcagaggcggcagcaaguguuccgcaggggcguguccaccagacggagcgccuacgccuucagccaccagcguggguacgccgaccugaucagcagcggccgaagcauccgcaagaagagguccccccuggacgccaucguggcggacgggaccgccgaguaccgccggaccggggacuccugauaauaggcuggagccucgguggccaugcuucuugccccuugggccuccccccagccccuccuccccuuccugcacccguacccccguggucuuugaauaaagucugagugggcggc

SEQ ID NO: 267 - RNA, 3919 nt, Artificial Sequence
  Synthetic Polynucleotide
gggaaauaagagagaaaagaagaguaagaagaaauauaagagccaccaugagcaccgagcgcgacucggagaccacguucgacgaggacagccagcccaacgacgaggucgugcccuacuccgacgacgagaccgaggacgagcuugacgaucagggcagcgccguggaacccgagcagaaccgggugaacagggaggccgaagagaaccgugagcccuucaggaaggaaugcaccuggcaggugaaagccaacgacaggaaauaccacgagcagccgcacuucaugaacaccaaguuccugugcaucaaggagagcaaauacgccaacaacgccaucaagacguacaaguacaacgccuucaccuucauccccaugaaccuguucgagcaguuuaaacgagcggccaaccuguacuuccuagcccuccucauccugcaagccgugccccagaucuccacccuggccugguauaccacccuggugccccugcugguggugcugggcgucacggcuaucaaggaccucguggacgauguggcgcggcacaagauggauaaggagaucaauaacaggacgugcgaagucaucaaagacggcagguuuaagguugccaaguggaaggagauccaggugggcgacgugaucaggcugaagaaaaacgacuucgugccugcggacauccugcugcugagcagcuccgagcccaacagccugugcuacguggagaccgccgaacuggauggcgagacgaaccugaaguucaagaugagccuggagaucaccgaccaauaccugcaaagggaggacacgcuggccaccuucgacggauucaucgagugcgaggagcccaacaaccgccuggacaaguucaccggcacccuguucuggaggaacaccuccuucccccucgacgcggacaagauacugcucaggggcugcgugauccggaauacggacuucugccacggccugguaaucuucgcuggggccgacaccaaaaucaugaagaacagcggcaagacacgcuuuaagcggaccaagaucgacuaccugaugaacuacaugguauacaccauauuuguggugcucauccugcugagcgcagggcuggccaucgggcaugccuacugggaggcccaggugggcaacucaagcugguaccuguaugacggcgaggaugacacccccagcuaccgaggcuuucugaucuucuggggguacaucaucguacucaacaccauggugcccauaagccuguacgugagcguggagguaauccggcugggccagucccacuucauuaacugggaccugcagauguacuacgcggagaaagacacccccgccaaggcgcgaaccaccacccugaacgagcagcugggucagauccacuacauauucuccgacaaaaccggcacccucacccagaacaucaugaccuucaagaagugcugcaucaacggccagaucuauggcgaccaccgggacgccucccagcacaaccauaacaagaucgagcaggucgauuucaguuggaacaccuacgccgacggaaagcuggccuucuacgaucacuaucucaucgagcagauccaguccggcaaggagccggagguccggcaauuuuucuuccuccuggccgugugccacaccgugaugguggaucguaccgacggacaacugaacuaccaggcagccagcccagaugaaggcgcacuggucaacgccgccaggaauuucggcuucgccuuccuggccaggacccagaacaccaucaccaucagcgagcuggggaccgaaaggaccuacaacguacuggccauccuggacuucaacuccgacagaaagcguauguccaucaucgucaggaccccggagggcaauaucaaacuguacugcaagggcgccgacacggugaucuaugaacgacugcaucggaugaacccgaccaagcaggaaacccaggaugcacuggauaucuucgccaacgagacccugaggacccucugccugugcuacaaggaaauugaggagaaggaguucaccgaguggaacaagaaguucauggccgccuccguggccagcacgaauagggaugaggcacucgacaagguguacgaggagauagaaaaagaccugauccugcugggagccaccgcgaucgaagacaagcugcaggacggcgugcccgagaccaucagcaaacuggccaaggccgacaucaaaaucuggguccugaccggcgauaagaaggagaccgcggagaacaucggcuucgccugugagcugcugaccgaggacacaacgaucugcuacggugaggacaucaacagccugcuccacgccaggauggagaaccagaggaaccgcgguggggucuacgccaaguuugccccccccgugcaagagagcuuuuucccccccggcggcaacagggcccugauuaucacggggagcuggcucaacgagauccugcuggagaagaagacaaagcggaacaagauccugaagcucaaguuccccaggaccgaggaggagaggaggaugcggacccaguccaagaggaggcuggaggccaagaaggagcaaaggcaaaagaacuucguggaccuggccugcgagugcuccgcagugauaugcugcagggugacgcccaagcaaaaggccauggugguggaccuggugaagagguauaagaaagccauuacccuggccaucggcgacggggccaacgaugugaacaugaucaagaccgcccacaucggcgugggcaucagcgggcaggaggggaugcaggccgugaugagcagcgauuacagcuucgcccaauucagguaucugcaacggcugcugcuaguccacgggcgguggagcuauauuaggaugugcaaguuucuccgguacuucuucuacaagaacuucgccuucacccuggugcauuucugguacagcuuuuucaacggcuacagcgcgcagaccgccuaugaagacugguucaucacccuguacaauguacuguacacgucacuccccgugcugcucauggggcugcuggaccaggacguuuccgacaagcugagccugagguuccccggccuguacaucguuggacagcgugaccugcucuucaacuacaagcgguucuucgugagucugcugcacggcgugcugacgagcaugauccucuucuucaucccccucggcgccuaccugcagaccgucggccaggacggcgaggcccccuccgacuaccagagcuucgcggugaccaucgccagcgcccuggugauaaccgugaauuuccaaaucgggcuggauaccucauacuggaccuucgucaacgccuucagcaucuucggaagcaucgcccuguacuucggaaucauguuugacuuccacucagcgggcauccacguccuguuccccagcgccuuucaguuuacaggcaccgccagcaacgcccugcgucagcccuacaucuggcugaccauuauccucgccguggccgugugucugcugcccguggucgccaucagguuccugagcaugaccaucuggcccagcgaguccgacaagauccagaagcacaggaagaggcucaaggccgaggagcaguggcagaggaggcaacaaguguuccggcgaggcgugagcacucggaggagcgccuacgcauucagccaccagagaggcuacgccgaucugauuuccucaggccgcuccaucaggaagaagaggagcccccuggacgccaucguggccgacggcaccgccgaauacaggcgcaccggcgacagcugauaauaggcuggagccucgguggccaugcuucuugccccuugggccuccccccagccccuccuccccuuccugcacccguacccccguggucuuugaauaaagucugagugggcggc

SEQ ID NO: 268 - RNA, 3919 nt, Artificial Sequence
  Synthetic Polynucleotide
gggaaauaagagagaaaagaagaguaagaagaaauauaagagccaccauguccaccgagagggauagcgagaccacguucgacgaggacagccaacccaacgacgagguggugcccuacuccgacgacgagaccgaggacgagcuggacgaccagggguccgccguggaacccgagcagaaccgugugaaccgagaggccgaggagaacagggagcccuucaggaaggagugcaccuggcaggugaaggccaacgaccggaaauaccacgagcagccccacuucaugaacaccaaauuccugugcaucaaggagagcaaguaugccaacaacgcgaucaagaccuauaaguacaaugccuucacuuuuauccccaugaaccuguuugagcaauuuaagcgcgcggccaaucucuacuuccucgcccuccugauccugcaggccgugccccagaucagcacccuggccugguacacaacccuggucccccugcugguggugcucggcgugaccgccaucaaggaccucguggacgacguggcccggcacaagauggacaaggagaucaacaaccguacgugcgaggugaucaaagacggcagguucaagguggccaaauggaaggagauucaggucggcgacgucaucaggcugaaaaagaacgacuucgugcccgccgauauccuccugcucagcagcuccgagcccaacucccugugcuacguggagaccgccgagcuggacggggagaccaaucugaaguucaagaugagccuggagauaaccgaccaguaccugcagagggaggauacgcuggccacguucgauggcuucaucgagugcgaagaacccaauaacaggcuggacaaguucaccgggacgcuguucuggaggaauaccagcuuuccacuggaugccgacaagauccugcucaggggcugcguaaucaggaacaccgacuucugucauggucuggugaucuucgccggggccgacaccaagauaaugaagaacucgggaaagaccagguucaagagaaccaaaaucgacuaucugaugaacuacaugguguacaccaucuucgucgugcugauccugcuguccgccgggcuggccaucgggcacgcuuacugggaggcccagguggggaacucgagcugguaucuguacgacggggaagacgacacccccuccuacaggggcuucuugaucuuuuggggcuacaucaucgugcugaacaccauggugccgauaagccuguaugugagcguggaggugauccgccuggggcagagccauuucaucaacugggaucuccaaauguauuacgccgaaaaggacacccccgccaaagccaggaccaccacccugaacgagcagcugggccagauccacuacaucuucagcgacaaaaccggcacccucacccagaacaucaugaccuucaagaagugcugcaucaaugggcagaucuacggcgaccauagggacgccagccagcacaaucauaacaaaauagagcaggucgacuuuuccuggaacaccuaugccgacggcaagcuggccuucuacgaccacuaccugaucgagcagauccagagcggcaaggagccggaggugaggcaguucuucuuccugcuggccgugugucacacggugaugguggacaggaccgaugggcagcugaacuaucaggccgcgagccccgacgagggggcccucgugaaugccgcccgcaacuucggcuuugccuuccuggcacggacccagaauacgaucaccaucagcgagcucggaaccgaaaggaccuacaacguacuggccauccucgacuucaacuccgacaggaagaggaugagcaucaucgugaggacccccgagggcaacaucaaacuguacuguaagggcgcggacaccgugaucuacgagcggcuccacaggaugaaucccaccaagcaggagacccaggacgcccuggacaucuucgccaaugaaacgcugagaacccugugccucugcuacaaagagaucgaggagaaggaguuuaccgaguggaauaagaaguucauggccgccagcguggccuccaccaaccgggacgaggcccuggacaaagucuaugaggagaucgagaaagaucugauccugcugggggcgacggccaucgaagauaaacugcaggauggcgugcccgagaccaucagcaagcuggcgaaggcagacaucaaaaucugggugcugacgggcgacaaaaaagagaccgccgagaacaucggcuucgccugcgagcugcugaccgaagacacgaccaucugcuacggcgaggacaucaacagucugcugcacgcccggauggagaaccagcggaacagaggcggcgucuaugccaaguucgcuccccccgugcaggaaagcuucuucccccccggcggcaacagggcccugaucaucacaggcagcuggcucaacgagauccuccuggagaagaagaccaaaaggaauaagauccugaagcucaaguuccccaggacggaggaggagaggaggaugaggacccaguccaagcgcaggcuggaggcgaagaaagagcagcgucagaagaacuucguggaccuggccugcgaaugcuccgccgucaucuguugccgcgugaccccaaaacagaaggccauggugguggaccuggugaagagguacaagaaggccaucacccuggccaucggagauggcgcgaacgacgucaauaugaucaagaccgcccacaucggcgugggaaucucgggccaggaggguaugcaggccgugauguccuccgacuacuccuucgcccaguuucgguaccugcagcggcugcugcugguccacggcagauggaguuacaucaggaugugcaaguuccugcgguacuucuucuacaaaaacuucgccuucacccuggugcacuucugguacagcuucuuuaacggguacagcgcgcagaccgccuacgaggacugguucauaacccuguacaacguccuguacacgucccugcccgugcugcugauggggcugcuggaucaggacguguccgauaagcugagccugagguuccccggccucuacaucgugggccagcgcgaccugcuguuuaacuacaagagguucuuugugagccugcugcauggggugcugaccagcaugauccucuucuucaucccccucggcgccuaccugcagacugucggccaggacggcgaggcccccagcgacuaccaaagcuucgccgugaccaucgccagcgcccucgugaucacggugaacuuccagaucggccuggacaccagcuacuggaccuuuguuaacgccuucagcaucuucggguccaucgcccuguacuucggaaucauguucgacuuucacuccgccgggauccacgugcucuuccccucggccuuccaguuuaccggcaccgcgagcaacgcccugcggcagcccuauaucuggcucaccauaauccucgccguggccgugugccugcugcccguggucgccauccgcuuccugucgaugacgaucuggccaagcgagagcgauaaaauccagaaacacaggaagcggcugaaggccgaggaacaauggcaacggcgccagcagguguucaggaggggggugagcacgaggaggagcgccuacgccuucagccaccagaggggcuacgccgaccugauuagcagcggccgcaguaucaggaagaagcgguccccccuggaugccaucguagccgacgggaccgccgaguaccgaaggaccggcgacagcugauaauaggcuggagccucgguggccaugcuucuugccccuugggccuccccccagccccuccuccccuuccugcacccguacccccguggucuuugaauaaagucugagugggcggc

SEQ ID NO: 269 - RNA, 3919 nt, Artificial Sequence
  Synthetic Polynucleotide
gggaaauaagagagaaaagaagaguaagaagaaauauaagagccaccaugagcaccgaaagggacagcgagaccaccuucgacgaggacagccagcccaacgacgaggugguccccuacuccgacgacgagaccgaggacgagcuggacgaucagggcagcgccguugagcccgagcagaacagggugaaccgggaagccgaggaaaaccgugaacccuucaggaaggagugcaccuggcaggugaaggccaacgaucgcaaauaccacgagcagccccacuucaugaacaccaaguuccuguguaucaaggagucgaaguacgccaacaacgccaucaagaccuauaaguacaacgccuucaccuuuauccccaugaaucuguucgagcaguucaagagggccgccaaucuguacuuccuggcacuccucauacuccaagccgugccccagaucagcacccucgcgugguacaccacccuggucccccugcucgugguccugggggucaccgccaucaaggaccugguggacgacguggccaggcacaagauggauaaggagaucaacaaucgcacgugugaggugauaaaggacggcagguucaagguggccaaguggaaggagauccaggucggcgacguuaucaggcugaaaaagaacgacuucgugccggcagacauccugcugcuguccagcagcgagccuaacucccucugcuacguggagaccgccgagcuggacggcgagaccaaccugaaguuuaagaugucccuggagauaaccgaccaauaccugcagcgggaggauacccucgccaccuucgacggcuuuaucgagugcgaggagcccaacaaccgccuggacaaguucaccggcacccucuucuggaggaacaccagcuucccgcuggacgccgacaaaauccuccugaggggcugcgugaucaggaacaccgauuucugccauggccucgucaucuucgccggcgccgauaccaagaucaugaagaacagcggcaaaaccagguucaagaggaccaagaucgacuaccugaugaauuacaugguauacaccaucuucgugguccucauccugcuguccgcgggccuggccaucggccacgccuacugggaggcccaggugggcaacucgagcugguaucuguacgacggcgaagacgacacccccagcuacaggggguuucugaucuucuggggguacauaaucgugcugaacaccauggugcccaucagccuguacguaagcguggaggugaucaggcucggccaaucgcacuucaucaacugggaucugcagauguacuacgccgagaaggacacccccgccaaggcccgcacuaccacccugaacgagcaacugggccagauccacuauaucuucuccgacaaaaccggcacgcucacccagaauaucaugaccuucaaaaaguguugcaucaacgggcagauauauggggaccacagggacgccagccaacauaaccacaacaagauagagcaggucgauuuuuccuggaacacauaugccgacggcaagcucgcuuucuacgaccauuaccugaucgagcagauccaguccggcaaggagcccgaagugaggcaguucuucuuccugcucgccgucugucauaccgugaugguggaccgcaccgacggccagcugaacuaccaggccgccagccccgaugaaggcgcccucgugaacgccgccaggaacuuuggauucgccuuucuggcgaggacgcagaacaccaucaccaucucggagcugggcaccgagcggaccuacaacgugcuggccauccuggacuucaacagcgacaggaagagaaugagcaucauugugcgcacccccgagggcaauaucaagcuguacuguaaaggagcggacaccgucaucuacgagcggcugcauaggaugaaccccaccaagcaggagacccaagaugcccuggacaucuucgccaacgagacccugaggacccugugucugugcuauaaggagaucgaagaaaaagaguucacagaauggaacaagaaguucauggccgccagcguagcaagcacgaacagggacgaggcccuggacaagguguacgaggaaaucgagaaggaccugauccugcugggggcaacggccaucgaggacaaacuacaggacggggugcccgagaccauuagcaagcuggccaaggccgacaucaagaucugggugcugaccggcgacaagaaggaaaccgcagaaaacaucgguuucgcgugcgagcugcuaaccgaggacaccaccaucugcuacggcgaggacaucaacucccugcugcacgccaggauggagaaccagaggaaucgagguggggucuacgccaaguucgccccccccgugcaagagagcuucuucccccccggcgguaacagggcccugauaaucaccgggagcuggcugaacgagauccugcuagaaaaaaagaccaaaaggaacaagauccugaagcugaaguucccccgcaccgaggaagagcggcguaugcgcacccagagcaagcgcaggcuggaggccaagaaggagcagaggcagaagaacuucguggaccucgccugugagugcagcgccgugaucugcugccgggugacccccaagcagaaggccaugguggucgaccuggugaagcgguacaaaaaggcgaucacacuggccaucggggacggcgccaacgacgugaacaugaucaagaccgcgcacaucggggugggcaucagcggccaggaggggaugcaggcggugauguccuccgacuacagcuucgcgcaauuccgguaccugcagcgccugcugcuggugcacggacgguggagcuacaucaggaugugcaaauuucugcgguacuucuucuacaagaauuucgcguuuacgcuggugcauuucugguacagcuucuuuaacggcuacuccgcccagaccgcauacgaggacugguucauuacccuguacaacgugcuuuacaccagccugcccgugcugcuuaugggccugcuggaccaggacgugagugacaagcugucccugagguuccccggccuguacaucgugggccagcgcgaucugcucuucaacuacaagagguucuuugugagccugcugcacggcguccucaccagcaugauacuguucuucaucccccugggcgcguaccugcagacagucggccaggauggcgaagcaccgucggacuaccaguccuucgcugugaccaucgccuccgcccuggugaucaccgucaauuuccagaucggccuggacaccagcuacuggaccuucgugaaugcguucagcaucuucggcuccaucgcccuguauuucgguaucauguucgauuuucacuccgccggcauccaugugcuguuccccagcgccuuccaguucaccggcacggccagcaacgcccugaggcagcccuacaucuggcugaccaucauccuggccguggccgugugccugcugccagugguggccauacguuuccugagcaugaccaucuggcccuccgagagcgacaagauccagaagcauaggaagcgccugaaggccgaggaacaguggcagaggaggcagcaggucuuccggcggggcgugagcacccggagaucagccuaugccuucagccaccagcggggauacgccgaccucaucagcagcggcaggagcauccggaagaagagguccccucuggaugccaucguggccgacgggaccgccgaauaccgcaggaccggcgauuccugauaauaggcuggagccucgguggccaugcuucuugccccuugggccuccccccagccccuccuccccuuccugcacccguacccccguggucuuugaauaaagucugagugggcggc

SEQ ID NO: 270 - RNA, 3919 nt, Artificial Sequence
  Synthetic Polynucleotide
gggaaauaagagagaaaagaagaguaagaagaaauauaagagccaccaugucgaccgagcgcgacagcgagaccaccuucgacgaggacagccagcccaacgacgagguggugcccuacuccgacgacgagaccgaggacgagcuggacgaucaggggagcgccguggaacccgagcagaauagggugaauagggaagccgaggagaaccgggaacccuuuaggaaggaaugcaccuggcaggugaaggccaacgacaggaaguaccacgaacagccccauuucaugaauaccaaguuucugugcaucaaagagagcaaguacgccaacaaugccauuaagacguauaaauacaacgccuucacauucauccccaugaaccuguucgaacaauuuaagcgcgccgccaaccuguacuuccucgcccugcugauccugcaggccgugccccagaucuccacccucgccugguacacgacccuggugccgcuccucgugguccugggcguuaccgccaucaaggaccucgucgacgacguagcccgccacaagauggacaaggagaucaacaacaggacaugcgaggugauaaaggacggccguuucaagguggcgaaguggaaggagauacaggugggcgacgugaucaggcugaaaaagaacgacuucgugccggccgacauccugcugcugagcagcagcgagccuaauucgcuguguuacguggagaccgccgaacucgacggugagaccaaccugaaguucaagaugucccuggagaucaccgaccaguaccuccagcgugaggauacacuggccaccuucgacggauucaucgagugugaggaaccgaacaacaggcucgauaaguucaccgggacccucuucuggcgcaacaccagcuucccgcucgaugccgacaaaauacugcugcggggcugcgugauccggaauaccgacuucugccaugggcuggugaucuucgcgggugccgacaccaagaucaugaagaacagcggcaagacgagguucaagcggaccaagaucgacuaccugaugaacuacaugguguacaccaucuucgugguacugauccugcugagcgccggucuggccaucgggcacgccuacugggaggcucaggugggcaacuccagcugguaccucuacgacggcgaggacgauacgccauccuaucgaggguuucugauuuucuggggcuacauaaucgugcucaauacgaugguccccaucagccuguaugucagcguggaagugaucagacugggccagucccacuucaucaacugggaccugcaaauguacuaugccgagaaggacacgcccgccaaggcccggacgacgacacugaacgagcagcugggccagauccacuacaucuucuccgacaaaaccggcacccugacccagaacaucaugaccuucaagaagugcugcaucaauggccagauauacggggaccacagggacgccagccagcauaaucauaacaagauugagcaggucgacuucagcuggaauaccuacgccgacggcaagcucgccuucuacgaccacuaccugaucgagcagauacaguccggcaaggagcccgaggugaggcaguucuucuuccugcuggccgucugccauaccgugauggucgacagaacggaugggcaacucaauuaucaggccgcgagccccgacgagggggcccuggugaacgccgccaggaacuucggcuucgccuuccucgccaggacccaaaacacgauaaccaucagcgagcugggcaccgagaggaccuacaacguguuggccauccuggacuucaacagcgaccgcaagcggauguccaucaucgugcguacgcccgaggggaacaucaagcuuuacugcaagggggccgacacggugaucuacgagaggcugcacaggaugaacccaacgaagcaagaaacgcaggacgcccuugacaucuucgcuaacgagacgcugaggacccugugccugugcuacaaggagaucgaggagaaggaguucacugaauggaacaagaaauucauggccgcgagcgucgccuccaccaacagggacgaggcccucgacaagguguacgaggagaucgagaaggaccugauccuccugggcgccaccgccaucgaagacaagcugcaagacggcgugcccgagaccaucagcaagcuggcgaaggccgacaucaagaucugggugcugaccggcgacaaaaaagagaccgccgagaauauaggcuucgcuugcgagcugcugaccgaggacacuaccaucugcuacggcgaggacaucaacucacugcuccacgccaggauggaaaaucaacgcaauagggguggcguguacgccaaauucgccccccccgugcaggagagcuuuuuuccccccggcggcaaucgggcccugaucauaaccggcuccuggcugaacgagauccugcuggagaagaagacgaagaggaauaagauccugaaacugaaguucccgaggaccgaagaggagaggcggaugaggacccaguccaagaggagacuggaggccaagaaggagcagcgccaaaagaacuucguggaccuggccugcgaguguagcgccgucaucuguugccgggugaccccgaagcagaaggcgauggucguggaccuggugaagcgguacaagaaggccaucacgcuggccaucggcgacggcgccaacgacguuaacaugaucaagaccgcccacaucggagucgggauuagcggccaggagggcaugcaggccgugaugagcuccgacuacagcuucgcccaauuccgauaucugcagaggcuccuccucgugcauggucgguggagcuacauccgaaugugcaaguuccugagguacuucuuuuacaagaacuucgccuucacgcuggugcacuucugguauagcuucuucaacggguacuccgcccagaccgccuacgaggacugguucaucacccucuacaacgugcuguacaccagccugccggugcugcugaugggucugcuggaccaggacguguccgacaagcugagccuccguuuccccggccuguauaucgugggacagagggaccugcuguuuaacuacaagagguuuuucguuagccugcugcacggggugcugaccuccaugauccuguucuucaucccccugggggccuaccugcagaccgucggacaagacggggaggcccccagcgacuaccaguccuuugccgugaccaucgccuccgcacucgugauaaccgugaacuuccagaucggacuggacacaagcuacuggaccuuugugaacgccuucagcaucuucggcagcaucgcccuguacuucggcaucauguuugauuuccauagcgccgggauccacgugcuguucccgagcgccuuccaguuuaccgguaccgcguccaaugcccugcggcagcccuacaucuggcucaccaucauccuggccgucgccgugugccuccugcccgugguggccauuagguuccuguccaugaccaucuggcccuccgagagcgacaaaauccagaaacacaggaagcgccugaaggccgaggagcaauggcagcgacggcagcagguguucaggaggggcgucagcaccaggagguccgccuacgccuucagccaccagaggggcuacgcggaccugaucagcuccgggagguccaucaggaaaaagcgguccccccucgacgccaucguggcggacggcaccgccgaguaccggaggaccggcgacagcugauaauaggcuggagccucgguggccaugcuucuugccccuugggccuccccccagccccuccuccccuuccugcacccguacccccguggucuuugaauaaagucugagugggcggc

SEQ ID NO: 271 - RNA, 3919 nt, Artificial Sequence
  Synthetic Polynucleotide
gggaaauaagagagaaaagaagaguaagaagaaauauaagagccaccauguccacugagagggacucagagaccaccuucgacgaggacagccagccgaacgacgagguggugcccuauagcgacgacgagacggaggacgagcuggacgaucaggggagcgccguggagcccgaacagaaccgugucaaccgggaagccgaggagaacagggagcccuuccgcaaggaguguaccuggcaggugaaggccaaugaccgcaaguaccacgagcaaccgcauuucaugaacacgaaguuccuguguaucaaggagagcaaauacgcgaacaacgcgaucaagaccuauaaguacaaugccuuuaccuucauccccaugaaccucuucgaacaguucaagagggcagccaaccuguacuuccucgcgcuacucauccuccaggccgugccacagaucuccacgcuggccugguacaccacccuggugccccugcuggucgugcugggcgugaccgccauaaaggaccugguggaugacguugccagacacaagauggacaaggagaucaauaaccggaccugcgaggugaucaaggauggcagguucaagguggcgaaguggaaagagauccaggugggcgacgugauccggcugaaaaagaacgacuucgugcccgccgacauccugcugcucuccagcucagagcccaacagccugugcuacgucgagaccgccgagcuggauggcgagaccaaccugaaguucaaaaugucccuggagauaacugaucaguaucugcagagggaggacacgcuggccaccuucgauggcuuuaucgagugcgaggagcccaacaacaggcucgauaaguucacgggaacccucuucuggcggaauaccagcuucccccuggacgccgacaagauccugcugaggggaugcgucauccgcaacacagacuucugucacggccucgucaucuucgccggggccgacaccaagaucaugaagaauuccggcaagaccagguucaagaggaccaagaucgacuaccugaugaacuacaugguguacaccauuuucgucgugcugauccugcugagcgccggccuggccaucggucaugccuacugggaggcccaggucgggaacagcagcugguaccuguacgacggcgaggacgacacgcccagcuacaggggcuuccugaucuucuggggcuacauaaucgugcugaacaccauggugcccaucucccucuacguuagcguggaagugaucaggcugggccagucccacuucaucaacugggaccugcagauguacuacgccgagaaggauacccccgccaaagccaggaccacgacgcugaacgagcagcugggccaaauccauuacaucuucagugauaaaaccggcacccugacccaaaacaucaugaccuuuaaaaagugcugcaucaauggccagaucuacggagaccacagggacgccagccagcacaaccacaacaagaucgagcagguggacuuuagcuggaacacuuacgccgacgggaagcucgccuucuacgaucauuaccugaucgaacagauccagagcggcaaagaacccgaggugaggcaguucuuuuuccuccucgccguaugucacaccgugaugguggacaggacggacgggcagcucaacuaccaggccgccagccccgacgagggcgcccuggugaacgccgcccggaacuuuggauucgccuuccuggcacgcacccagaauaccauaacgaucucggagcugggcaccgaaaggacguacaacgugcucgcuauccuggacuucaacagcgaccggaagaggauguccauaaucgugaggacccccgagggcaacaucaagcuuuacuguaagggggccgacacagucaucuacgaaaggcugcaucgcaugaaccccacgaaacaggagacccaggaugcccuggacaucuuugccaacgagacccugaggacccuguguuuaugcuacaaggaaaucgaggagaaggaguucaccgaguggaacaagaaguucauggccgcguccguggcgagcaccaacagggacgaggcccuggacaagguuuaugaggagaucgagaaggaccucauccugcugggggccaccgccaucgaggacaaacugcaagauggagugccagagaccaucagcaagcuggccaaggccgacaucaagaucugggugcugaccggcgauaagaaagagaccgccgagaacaucggcuucgcgugcgaacugcugaccgaggacacgaccaucuguuacggcgaggacauuaacagccugcugcacgccagaauggagaaucagaggaacaggggcggaguguacgccaaguucgccccccccguccaggaaagcuuuuucccgcccggaggcaacagggcccugauaaucaccgggagcuggcugaacgagauccucuuggagaagaaaaccaagaggaacaagauacucaagcuuaaguuuccccgaaccgaggaggagcggaggaugcgcacccagagcaagaggaggcuggaggccaagaaagagcagcgccagaagaacuucgucgaucuggccugcgaaugcuccgccgugauaugcugcagggugacccccaagcagaaggccauggugguggaccuggucaaaagguacaagaaggccaucacccucgccaucggggacggcgccaacgacgucaacaugaucaagaccgcccauaucggcgugggcauaagcggccaggaaggcaugcaggccgugauguccuccgacuauagcuucgcccaguucagguaccugcagcggcugcugcuggugcauggacggugguccuacauccgcauguguaaguuccuccgguacuucuucuauaagaacuuugcguucacccuggugcacuucugguacagcuucuucaauggcuauagcgcccagaccgccuacgaagacugguucaucacccuguacaacgugcuguacaccagccugcccguccugcugauggggcuucuggaccaggacgucagcgacaagcugagccuccgcuuccccgggcuguacaucgucggacagagggaccuccucuucaauuacaagagguucuucgugucccugcuccauggcgugcugaccagcaugauccuguuuuucaucccgcuuggggccuaccugcagaccgugggccaggacggagaggcacccagcgacuaccaguccuuugccgugaccaucgcguccgcccuggugaucaccgugaacuuucagauaggucuggacaccuccuacuggacguucgugaacgccuucagcaucuucggcagcauagcccuguacuucgguaucauguucgauuuccacagcgccggcauccacgugcucuuucccuccgccuuucaguucaccggcaccgccagcaacgcacugcgccagccuuacaucuggcugacgaucauccuggccguggccgugugccugcugcccgucguggccauccguuucuugagcaugaccauuuggccgagcgagagcgacaagauccagaagcacaggaagcggcugaaggccgaggaacaauggcagcgucggcagcagguuuucaggaggggcgugagcacccggaggucugccuacgccuuuucccaccagagggguuaugccgaccugaucagcagcgggaggagcaucaggaagaagaggagcccccuggacgccaucgucgccgacggcaccgcugaguaccgcaggaccggcgauagcugauaauaggcuggagccucgguggccaugcuucuugccccuugggccuccccccagccccuccuccccuuccugcacccguacccccguggucuuugaauaaagucugagugggcggc

SEQ ID NO: 272 - RNA, 3919 nt, Artificial Sequence
  Synthetic Polynucleotide
gggaaauaagagagaaaagaagaguaagaagaaauauaagagccaccaugagcaccgagagggacuccgagaccacuuuugacgaggauagccagcccaacgacgaggugguacccuacuccgacgacgagaccgaggacgaacuggacgaccagggcagcgccguggagcccgaacagaaccgcgugaauagggaggccgaggagaaccgggagcccuucaggaaggagugcaccuggcaggugaaggccaacgacagaaaauaccacgagcagccccacuucaugaauaccaaguuccugugcaucaaagagagcaaguacgccaacaacgcgaucaagaccuauaaguacaacgccuucaccuuuauccccaugaaccuguucgagcaguuuaagcgagccgccaaccuguacuuccuggcccugcugauccugcaggccgugccccagaucagcacccuugcuugguacaccacccuggucccccugcuggucgugcucggagugaccgccaucaaggaccugguggacgacguagcccggcacaagauggacaaggagaucaacaaccgcaccugcgaagugaucaaggacggccgguuuaagguggcgaaguggaaggaaauccaagugggcgacgugauccgccugaaaaaaaacgauuucgugcccgcagacauccuccuccugagcagcagcgagcccaacagccuguguuacguggagaccgcagagcuggacggggagaccaaucugaaauucaagaugagccuggagauaacugaccaauaccugcagagggaggacacccuggccaccuucgauggcuucaucgagugcgaggagcccaauaacaggcuggacaaguuuaccggcacccuguucuggcgcaacaccuccuucccccucgacgccgacaagauccugcugcggggcugcgugauucgaaauaccgauuucugccacggccuggugaucuucgccggcgccgacaccaagaucaugaagaacagcggcaagaccagguuuaagaggaccaagaucgauuaccugaugaacuacauggucuacaccaucuucguggugcugauccugcugagcgccggccuggccaucggccaugccuauugggaggcccaggugggcaacuccagcugguaucuguacgacggagaggacgacacccccagcuauaggggcuuccugaucuucugggguuacaucaucgugcugaacacgauggugccaauuagucuguacgugagcguggaggugaucaggcugggucagagccacuuuaucaacugggaccuccaaauguacuaugccgagaaggacaccccagccaaggccaggaccaccacacugaacgagcagcugggccagauccacuacaucuucuccgacaaaaccgguacccugacccagaauaucaugaccuuuaagaagugcugcaucaacgggcaaauauacggcgaucaucgcgacgccucucagcacaaccauaauaagaucgagcaagucgauuucuccuggaacaccuacgccgacggcaaacuggccuucuacgaucacuaucugaucgagcagauccagagcggcaaggagcccgaggucaggcaguucuuuuuucugcucgcugucugucacaccgucaugguggaccgcaccgacggccaacugaacuaucaggccgcgucccccgacgaaggggcccuggucaacgccgccaggaacuuuggcuuugccuuccuggccaggacccagaacaccaucaccaucagcgagcucggcaccgaacgcacguacaacgugcucgccauucuggacuucaacuccgacaggaagcggaugagcaucaucgugaggacccccgagggcaacaucaagcucuacugcaagggcgcggacaccgugaucuacgagcggcugcaccgaaugaaccccaccaagcaggaaacccaggacgcccuggacaucuucgcgaacgagacgcugcgaacccugugucugugcuacaaggagaucgaggagaaggaguucaccgaguggaacaagaaguucauggccgccuccguggccucgaccaaccgggaugaggcccuggauaagguguaugaggagaucgagaaggaccugauacugcugggcgccaccgccaucgaggacaaacugcaggauggcgugcccgaaaccaucagcaagcuggccaaagccgacaucaagaucugggugcucaccggagacaagaaggaaaccgccgagaauauaggguucgccugugagcuccugaccgaagacaccaccaucugcuacggcgaggacaucaacagccugcugcacgcccggauggagaaccagcggaacaggggcgggguguacgcgaaauucgcccccccggugcaggagagcuucuucccccccggcggaaacagggcccugaucaucaccggcagcuggcugaacgagauccugcuggagaagaaaaccaaacggaacaagauccugaagcuaaaauuuccgaggaccgaggaagaaaggaggaugcgcacccagagcaagaggaggcuggaagccaagaaggagcagaggcagaagaacuucguggacuuggccugcgagugcucagccgugaucugcugccgcgugacccccaaacagaaggccaugguggucgaccuggugaagagguauaagaaggccaucacccuggcaaucggcgacggagccaaugacgugaauaugaucaaaaccgcccacaucggcgugggcaucucggggcaggagggcaugcaagccgugaugagcagcgacuacagcuucgcccaguuucgguaccugcagcggcugcuccuggugcauggccgauggagcuacauccgcaugugcaaguuccugcgcuacuucuucuacaaaaacuuugccuucacccuggugcacuucugguacagcuucuucaacggauacuccgcccagaccgccuacgaggacugguucaucacccuuuacaacgugcuguacaccucccucccgguccugcugauggggcuucuggaccaggacguguccgacaaacucagccugagguuccccggccuguacaucgugggccagcgggaucuccuguucaacuacaaaagauucuucgucucccugcugcacggagugcugaccuccaugauccuguucuucauaccacugggcgccuaccugcagaccgucggccaggacggcgaggcccccucggacuaccagagcuucgccgugaccaucgccagcgcccugguuaucaccgugaauuuucagaucggccuggauacuagcuauuggaccuucgugaacgccuucagcaucuucggcucgaucgcgcucuauuucgguaucauguucgacuuccacagcgccggaauccacguccuguucccguccgcauuccaguucaccgggaccgccagcaaugcccucaggcagccguacaucuggcucaccaucauccucgccguggccgugugccugcugccagucguggccaucagauuccuguccaugacgauauggcccucagaguccgacaaaauccagaagcaccgcaagcggcugaaggcggaggagcaguggcagcggcggcagcagguguuuaggcgcggcgucagcacccgccggagcgccuacgccuucucccaccagaggggcuaugccgaucugaucagcagcggcagguccauccggaagaagcgcagcccccuggacgccaucgucgccgacgggacggccgaauauaggaggaccggcgacagcugauaauaggcuggagccucgguggccaugcuucuugccccuugggccuccccccagccccuccuccccuuccugcacccguacccccguggucuuugaauaaagucugagugggcggc

SEQ ID NO: 273 - RNA, 3919 nt, Artificial Sequence
  Synthetic Polynucleotide
gggaaauaagagagaaaagaagaguaagaagaaauauaagagccaccaugagcaccgagagagauagcgaaaccaccuuugacgaggacagccagccaaacgacgagguugugccuuacagcgacgacgagaccgaggacgagcuggacgaccagggcagcgccguggagcccgagcagaaucgugucaauagggaagccgaagagaacagggagcccuuucgcaaggagugcaccuggcaggucaaggccaaugaccgaaaguaccacgagcagccgcacuucaugaauaccaaguuccugugcauaaaagagagcaaguacgcgaacaacgccaucaagaccuacaaguacaacgccuucaccuucauccccaugaaccuguuugagcaauucaagagggcggccaaccuguauuuccuggcccugcugauccugcaggccgucccccagaucuccacccuggccugguacaccacccuggugccccugcugguggugcugggcgugaccgcuauaaaggaccuggucgaugauguggccagacauaagauggacaaggagaucaauaaccguaccugcgaagucaucaaggaugggcgguucaaaguggccaaguggaaagagauccaggugggggacgugauccgccugaagaaaaacgacuucgugcccgcggacauccuccugcucuccagcagcgagcccaacagccugugcuaugucgagaccgccgagcuugacggggagaccaaccugaaguuuaagaugucccuggaaaucaccgaccaguaccuccagagggaggacacccuggccaccuucgacggguucaucgagugugaggagcccaacaauagacuggauaaauucacgggcacccuguuuuggcgaaacacauccuucccccuggacgcggacaagauccugcucaggggcugcgugauccgaaacaccgacuucugucauggccuggugaucuucgccggggcggacacgaagaucaugaagaauuccgguaagaccagguucaaaaggacaaagaucgacuaccugaugaacuacaugguguauaccaucuucguggugcugauccuccugagcgccggccuugccaucggccaugccuacugggaggcccaggugggaaacagcagcugguaccuguacgauggcgaggacgacacccccagcuacagggguuuccugaucuucuggggguacaucaucgugcuaaacaccauggugcccaucagccucuaugugagcguggaggugauccggcugggccagagccacuucaucaauugggaccugcagauguauuacgccgaaaaggacacccccgccaaggcucgaaccaccacccugaaugagcagcugggccagauccacuacauuuucuccgacaagacgggcacccugacccagaacaucaugaccuucaagaagugcuguaucaacggccagaucuauggcgaccacagggaugccagccagcacaaccacaacaaaaucgaacagguggacuucagcuggaacacguaugcggacggcaaacuggccuucuacgaccacuaccugaucgagcagauccagucuggcaaagagcccgaagugcgucaguucuucuuucugcuggccgucugccacaccgucaugguggaccgcaccgacggccaacugaacuaccaggccgcgucccccgacgagggcgcccuggugaacgccgcgcguaacuucggguucgccuuccuggcccgcacccagaacaccaucaccaucagcgagcuggggaccgagaggaccuauaaugugcuggccauccuggacuuuaacagcgaccggaaacgcaugagcaucauaguaaggacccccgagggcaacaucaagcuguacugcaagggggccgacaccgugauauacgagagguugcacaggaugaacccaacgaaacaggaaacgcaggacgcgcuggacaucuuugccaacgagacacuccguacucugugccucugcuacaaggagaucgaggaaaaggaguuuaccgaauggaacaagaaauucauggccgccagcguggccuccaccaaccgcgacgaggcccuggacaagguguacgaggagaucgagaaggaccucauccuccugggcgcgaccgccaucgaggacaagcugcaggacggcguccccgagaccaucagcaagcucgccaaggcagacaucaagaucugggugcugaccggagacaaaaaggagacggccgaaaacaucggguucgccugcgagcugcugacagaggacaccaccaucugcuauggcgaagauaucaacucgcugcugcacgcccgaauggagaaccaacggaauaggggcggcgucuacgccaaguucgccccccccguccaggaaagcuucuuccccccgggcgggaaccgggcccugaucaucaccggcagcuggcucaacgagauccugcucgaaaagaagaccaagaggaacaagauccucaagcucaaguuccccaggacagaggaggagaggaggaugaggacccaaagcaagcggcggcuggaggccaagaaggagcaaaggcagaagaacuuuguggaccuggccugcgagugcagcgccgugaucuguuguagggucacccccaagcagaaggccauggucguggaccuggugaagagguacaagaaggccaucacccuggccaucggggacggcgccaacgacgugaacaugaucaagaccgcccacaucggcgugggcaucuccggucaggaagguaugcaggccgugauguccuccgacuacuccuuugcgcaguuccgguaccugcaacgucugcugcuggugcauggcagguggagcuacaucaggaugugcaaguuucugcgguauuuuuucuauaagaauuucgccuucacccuggugcacuucugguacagcuucuucaacggcuauagcgcccagaccgccuacgaggauugguucaucacccuguacaacgugcuguacaccagccuccccgugcugcugaugggccugcuggaucaggacgugagcgacaagcugagccugcgguuccccggucuguauaucgugggacaacgggaccugcuguucaacuacaaaagguucuucgucagccuccugcacggggugcugaccuccaugauacucuucuuuaucccucugggcgcguaccugcagaccgugggccaggauggggaggcgcccagcgacuaccagucguucgccgugaccaucgccucagcccucgugaucaccgugaacuuccagaucgggcuggauaccagcuacuggaccuuugugaacgccuucaguaucuucggcagcaucgcccuguacuucggcauaauguucgacuuucacagcgccggaauccacgugcuguuccccagcgccuuccaguuuacggguaccgccuccaacgcccugcggcagcccuauaucuggcucaccaucauucuugccguugcggucugccuccugcccgucguggccauccgguuccucagcaugaccaucuggcccagcgagagcgacaagauccagaagcacaggaaacggcugaaggccgaagagcaguggcagaggaggcagcagguguuuaggaggggcgucagcacccgacggucggccuacgccuuuucgcaccaacgaggguacgccgaccugaucagcuccggccgguccauccgaaagaagagguccccgcuggacgccaucgucgcagacggcaccgccgaguaucggaggacgggcgacagcugauaauaggcuggagccucgguggccaugcuucuugccccuugggccuccccccagccccuccuccccuuccugcacccguacccccguggucuuugaauaaagucugagugggcggc

SEQ ID NO: 274 - RNA, 3919 nt, Artificial Sequence
  Synthetic Polynucleotide
gggaaauaagagagaaaagaagaguaagaagaaauauaagagccaccaugagcaccgagagggacagcgagaccaccuuugacgaggacucccaacccaacgacgaggucgucccguacagcgacgacgaaaccgaggacgaacuggacgaucagggguccgccguggagcccgagcagaaccgggugaaccgcgaggccgaagagaaccgcgagcccuucaggaaagagugcacauggcaagugaaggccaacgacaggaaguaccaugagcagccucacuucaugaacaccaaguuucugugcaucaaggaguccaaguacgccaacaaugccaucaagaccuauaaguacaacgccuucaccuucauccccaugaaccucuucgagcaguucaagcgggccgcgaaccuguacuuucuggcgcugcugauccuacaggccgugccccagaucuccacccuggcaugguacaccacccuggugccgcugcugguggugcugggggugaccgccaucaaggaucugguggacgacgucgcccggcauaagauggacaaggaaaucaacaauaggaccugcgaggugaucaaggacggcagguucaagguggccaaguggaaggagauccaagugggcgacgugauccgccugaagaagaaugauuucgugcccgcggacauccugcuccuuagcagcagcgaaccuaacucccucugcuacguggagaccgccgaacuggacggcgagaccaaccugaaguucaagaugagccuggaaaucacggaccaguaccugcagcgcgaggacacccucgcgaccuucgacggauuuaucgaaugcgaagagcccaacaacaggcuggacaaguucaccgggacccuguucuggaggaacaccagcuuuccccuggaugccgauaagauccugcugcgcggcugcgucauuaggaauaccgacuucugccacggccuggucaucuucgccggcgccgacaccaagaucaugaagaauagcgggaagacaagguucaagcgaaccaagaucgacuaccugaugaauuacaugguguacaccaucuuugucgugcugauccugcucagcgccggccuggccaucggccacgccuacugggaggcccaggugggcaacuccagcugguaucuguacgauggggaggacgacacccccagcuaccgcggguuccugaucuucuggggguacaucauaguccuuaauaccauggugcccaucagccucuacgugagcguggaagugauccggcugggccagagccauuuuaucaauugggaucuccaaauguacuaugccgagaaggacacccccgccaaggccaggacgaccacccugaacgagcagcugggacagauccacuauaucuucagcgacaagaccgggacccugacccagaacaucaugaccuucaaaaaguguugcaucaauggccaaauauacggcgaccaccgcgacgccagccagcacaaccacaacaagauagagcaggucgacuucuccuggaacaccuacgccgaugggaagcucgcguucuacgaccacuaccugaucgagcagauccaguccgggaaggagcccgagguccgccaguuuuucuuccugcuggccgugugccauaccgugaugguggaccgaaccgacgggcagcugaacuaccaggcagccucccccgacgaaggcgcccuggugaaugccgccaggaacuucggcuucgcguuucuggccaggacccagaacacgauaacaaucuccgagcugggcaccgagcggaccuacaacgugcuggccauccucgacuucaauuccgacaggaagaggauguccaucaucgugaggacccccgagggaaacauuaaacuguacugcaaaggcgccgacaccgugaucuacgagcgccuccaccgaaugaaccccaccaagcaggagacccaggaugcccuggacaucuucgcgaaugagacgcuccgcacccugugccucugcuacaaagagaucgaggagaaggaauucaccgaguggaacaagaaguucauggccgccuccgucgccagcaccaaccgggacgaggcccuggacaagguguacgaagaaaucgagaaagaccugauacugcugggcgccaccgccaucgaagacaaacugcaggacggcgugcccgagaccaucagcaaacuggccaaggccgacaucaaaaucugggugcucaccggggacaaaaaggaaacggccgaaaacaucggcuucgcuugcgagcugcugaccgaggauaccaccaucugcuauggagaggacaucaacucccugcugcacgcgaggauggagaaucagaggaaccgcggcggcguguacgccaaguucgcgccccccgugcaagaaagcuucuucccccccggcgguaacagggcgcugaucaucaccgggagcuggcugaacgagauccugcuggagaagaagaccaagcgcaacaagauucugaagcucaaguucccccgaacagaggaggagaggcggaugcggacccagucaaagaggaggcuggaagccaagaaggagcagaggcagaagaacuucguggaccuggccugcgagugcagcgccgucaucugcuguagggucacccccaaacagaaagcaauggugguggaccuggugaagagguacaagaaggcgaucacccuggccauaggcgacggggccaacgacgugaacaugaucaagacggcgcauaucggcgugggcaucagcggccaggaagguaugcaggccgugaugagcagcgacuacagcuuugcgcaguuccgguaccuccagaggcuccugcugguccauggcagguggagcuacaucaggaugugcaaguuucucagguacuucuucuacaagaacuucgccuucacccuggugcacuucugguacagcuucuucaauggguacuccgcccagaccgccuacgaggacugguucaucacccuguacaacgugcuguacaccagccugcccgugcugcugauggggcugcuggaccaggacguguccgauaagcugagccucagguucccgggccuguacaucgugggccagcgggaccugcuguuuaacuacaaacgguucuucgugagccuccugcacggcgugcucaccagcaugauccucuucuuuaucccccugggagccuaccugcagaccguggggcaggacggggaggcccccagcgacuaccaguccuuugcggugaccaucgccuccgcccuggugaucaccguuaacuuucagaucggccucgacaccagcuacuggacguucgugaacgccuucuccaucuucggcaguaucgcccuguacuucggcaucauguucgacuuucacagcgccggcauccacguccuguuucccagcgccuuucaguucaccggaaccgccagcaacgcccugaggcagcccuacauauggcugaccauaauccuggccguggcagugugccugcugccuguaguggccauccgcuuccuguccaugaccaucuggccguccgagagcgacaagauccagaagcaucgcaagcggcugaaggccgaggagcaguggcagaggcgccagcaaguguucaggcgcggcgucuccaccaggaggucggccuacgccuucagccaucagcggggcuaugcggaccucaucagcucgggccguagcaucaggaagaaacggagcccccucgacgccauaguggccgauggaaccgccgaguacaggaggaccggcgacuccugauaauaggcuggagccucgguggccaugcuucuugccccuugggccuccccccagccccuccuccccuuccugcacccguacccccguggucuuugaauaaagucugagugggcggc

SEQ ID NO: 275 - RNA, 3919 nt, Artificial Sequence
  Synthetic Polynucleotide
gggaaauaagagagaaaagaagaguaagaagaaauauaagagccaccaugagcaccgagcgagacuccgagacgaccuuugacgaggacucccagcccaacgacgagguggugccguacagcgacgacgaaaccgaggacgagcuggacgaucagggcagcgccguggagccggagcagaacagaguuaaucgggaggccgaggagaacagggagcccuucaggaaggaguguaccuggcaggugaaggccaacgauaggaaguaucacgagcagccccacuucaugaacaccaaguuucugugcauuaaggagagcaaguacgccaacaacgccaucaagaccuacaaguacaacgccuucaccuucauccccaugaaccucuucgagcaauucaagagggcggccaaucuguacuuccucgcccugcugauccugcaagccgucccucagaucagcacccuggccugguauaccacccuggugccccugcugguggugcugggagugacggccaucaaggaccugguagacgaugucgccaggcacaagauggacaaggagaucaacaauaggaccugcgagguaaucaaggacggccgcuucaaagucgcgaaguggaaggagauacaagugggggacgugauucggcucaagaaaaacgauuucgugcccgccgauauucugcugcugagcagcagcgagccgaacagccugugcuauguggaaaccgccgagcuggacggcgaaaccaaccugaaguucaaaaugagccuggaaauaaccgaccaguaucuucaaagggaggacacccuggcgaccuucgacggguucaucgagugcgaagagcccaacaaccggcuggacaaguucaccggaacccuguucuggaggaacaccagcuucccccuggacgccgauaagauccugcugagaggcugugugauccggaacaccgauuucugccacggccuggugaucuucgcgggcgccgacacaaagaucaugaagaacagcgguaagacaagguucaagcggaccaagaucgauuaccugaugaauuacaugguguauaccaucuucguggugcugauccugcuguccgcgggccuggcgaucggccaugccuauugggaggcgcaggugggcaacagcagcugguaucucuacgauggcgaggacgacacccccuccuaucguggcuuucugauauucuggggcuauaucaucguccucaacaccauggugcccaucagccucuacgucuccgucgaggugaucaggcugggacagucgcacuuuaucaauugggaucugcagauguacuaugccgagaaggauaccccagccaaggcccggaccacgacccugaacgagcagcuggggcagauccacuauaucuuuagcgauaagaccgggacccuaacccagaacaucaugaccuucaaaaagugcugcauuaacggccagaucuacggcgaucacagagacgccagccagcacaaccacaacaagaucgagcagguggauuuuuccuggaauacuuacgccgacggaaagcuggccuucuaugaccacuaccugaucgaacaaauccaguccggcaaggagcccgaggugcgccaguuuuucuuccuucuggccgugugccauaccgugaugguggaccggaccgacgggcagcugaacuaccaggccgccagccccgacgagggggcccuggucaacgccgccaggaacuucggauucgccuuucuggcgaggacccagaacaccaucaccaucuccgaacuggggaccgagcggacauacaacgugcuggccauccucgacuuuaacucggaucggaagcguauguccaucaucgucaggaccccggaagggaacauaaagcuguauuguaagggggccgauaccgugaucuacgagcgccugcacaggaugaaccccaccaagcaggagacccaagacgcccuggauaucuucgccaacgagacccugcgcacccugugccugugcuacaaggagaucgaggagaaagaguuuaccgaguggaacaagaaguuuauggccgccagcguggccagcaccaacagggaugaggcccuggacaagguguaugaggagaucgagaaggaccucauccuguuaggugccaccgccauagaggacaagcuccaggacggggugcccgagacaaucucgaagcucgccaaggccgacaucaagaucugggugcugaccggcgacaagaaggagaccgccgagaacaucggcuucgccugcgagcugcugacggaggacaccaccaucugcuacggcgaggacaucaacagccugcugcacgccaggauggagaaccagcguaaccggggcggcgucuacgccaaguucgccccccccgugcaggagagcuucuuuccacccggaggcaacagggcccugaucaucacuggcagcuggcugaacgaaauccugcucgaaaaaaagaccaagaggaacaagauccugaagcugaaguuccccaggaccgaggaggaaaggaggaugaggacccaguccaagaggcgacucgaggccaaaaaagaacagaggcagaagaacuuuguggaccuggccugcgaguguagcgccgugauuugcugccgagugaccccaaagcagaaggccauggugguggaccugguaaagagguacaagaaagccaucacgcuggccaucggcgacggcgccaacgacgugaacaugaucaagacagcgcauauaggcgugggcaucagcggccaggaaggcaugcaggccgucaugagcuccgacuacagcuucgcccaguucagguaccugcagcggcugcugcucgugcacgggcgguggagcuacaucagaaugugcaaguuccugagguacuucuucuacaagaacuucgccuucacccuggugcacuucugguacagcuucuuuaacggcuacuccgcgcagaccgccuaugaggacugguucauaacccuguacaacgugcuguacaccucccuacccguccuccucaugggacugcucgaccaggacgugagcgauaagcugucccugagguuccccgggcuguacaucguggggcaaagggaccugcuguucaacuacaagcgcuuuuucgugagccuguugcacggggugcugaccagcaugauccucuucuuuauuccccucggggccuaccugcagaccgucggccaggacggggaagcgcccuccgauuaccagagcuucgccgugaccaucgccucggcgcuggugaucaccgugaacuuccagaucgggcuggacaccagcuacuggaccuucgugaacgccuucagcaucuuugggucgaucgcccuauacuucggcaucauguucgacuuucacuccgccgguauccacgugcuguuccccagcgccuuccaguucaccggcacggccuccaacgcccugaggcaacccuacaucuggcugacaaucauccuggccguggcgguaugucugcugccgguuguggccaucagguuccugagcaugaccaucuggcccuccgagagcgacaagauccagaagcaccgcaagcgacugaaggccgaggagcaguggcagaggcgacagcagguguucaggcgaggcgugagcaccaggcguagcgccuaugccuucagccaccagaggggcuacgccgaccucaucagcuccggccgguccaucaggaagaagagguccccccuggacgcuaucguggcagaugggaccgccgaauacaggaggacuggcgacagcugauaauaggcuggagccucgguggccaugcuucuugccccuugggccuccccccagccccuccuccccuuccugcacccguacccccguggucuuugaauaaagucugagugggcggc

SEQ ID NO: 276 - RNA, 3919 nt, Artificial Sequence
  Synthetic Polynucleotide
gggaaauaagagagaaaagaagaguaagaagaaauauaagagccaccaugagcaccgagcgggacagcgagaccaccuuugacgaggacucccaaccgaacgacgaagugguccccuacagcgacgacgagaccgaggacgagcuggacgaccaggggagcgccguggaaccggagcagaacagggugaaucgggaagccgaggagaaucgggagcccuucagaaaggaguguaccuggcaggugaaagcgaacgaucgaaaguaccacgagcagccccauuucaugaacaccaaguuccugugcaucaaagagagcaaguacgccaacaacgcgaucaagaccuacaaguacaaugccuucacauucauccccaugaaccuguucgagcaguucaagagggccgcgaaccucuauuuccucgcccugcugauccugcaggcggugccccagaucagcacccuggccugguacacaacccuggugccccuccugguggugcucggggucaccgccauaaaggaccugguggacgacguggcgaggcacaaaauggacaaagagaucaacaacaggaccugcgaggugaucaaagauggcagguucaagguagccaaauggaaggaaauacaggugggcgacgugauccggcugaagaagaacgacuucguccccgcggauauccugcugcucuccuccucggagcccaacagccuguguuacguggagacagccgagcuggauggcgaaaccaaucugaaguucaagaugagccuggaaaucaccgaccaauaccugcagcgggaggacacccuggccaccuucgauggcuuuauagagugcgaggagcccaacaaucgccuggauaaguucacggggacccuguucuggcggaacaccagcuucccccuggacgccgacaagauccugcugaggggcugcgugaucaggaacaccgacuucugccacggccucgugaucuuugcgggggccgacaccaagaucaugaagaacagcgggaagaccagguucaagaggaccaaaaucgacuaccugaugaacuacaugguguacacuaucuucgugguccugauccugcuauccgcaggacucgccaucggccacgccuacugggaagcccaggugggcaacagcucgugguaccuguacgacggcgaggacgacacccccucuuacaggggcuuccugaucuuuuggggauauaucaucgugcucaacaccauggugcccaucucgcuguacgucuccguggaggugauaaggcugggccagagccacuuuaucaauugggaucugcagauguacuacgccgagaaggacacuccugcuaaggccaggaccacgacccucaacgagcagcugggccaaauccacuacaucuuuagugacaagaccggcacccugacccagaacaucaugaccuucaagaagugcugcaucaacggccagaucuacggcgaccacagggaugccagccagcauaaccacaacaagaucgagcagguugacuucagcuggaacaccuacgcggacggcaagcuggccuucuacgaccacuaucugaucgagcagauccagagcggcaaggagcccgaggugcggcaguucuucuuucugcuggccguuugccacaccgugaugguggacaggaccgauggccagcugaacuaccaggccgcaagccccgacgagggcgcccuggucaacgcggccaggaacuuuggcuucgccuuccuggccaggacccagaacaccaucaccaucuccgagcugggaaccgaaaggaccuauaacguccuggccauccuggacuucaacagcgacaggaagaggauguccaucaucgugaggacccccgaggggaacaucaagcucuacuguaagggcgccgacaccgugaucuacgagcgccuccacaggaugaaucccaccaagcaagagacccaggacgcccucgauaucuuugccaaugagacgcucaggacccucugucugugcuacaaagagaucgaggagaaggaguucaccgaguggaacaagaaguucauggccgccagcguggcgagcaccaaccgggacgaggcccucgacaagguguacgaggagaucgagaaggaccucauacugcucggagccaccgcaaucgaggacaagcugcaggacgggguuccggagaccaucuccaagcuggccaaggccgacaucaaaaucugggugcugaccggggacaagaaggagaccgccgagaacaucggcuucgccugcgagcugcugaccgaggacaccaccaucugcuauggugaggacaucaauagccuacugcacgcccguauggagaaccagcggaaucggggcgggguguacgccaaguucgcgccccccgugcaggagagcuucuucccccccgguggaaacagagcccugauaaucaccggcagcuggcucaacgagauccugcuggagaagaaaaccaagaggaacaaaauccugaagcugaaauucccccggaccgaggaggaaaggcgaaugaggacccagagcaagagacgccuggaggccaagaaagaacagcggcagaagaacuucguggaucucgccugugaaugcagcgccgugaucugcugcagggugacccccaagcagaaggcgauggugguggaccuggugaagagguacaagaaggccaucacccuggccauuggcgacggggccaaugacgucaacaugauaaaaaccgcgcacaucggcguggguaucagcggccaggagggcaugcaggccguaaugagcuccgauuacucguucgcccaguuucgcuaccuccagcgccugcugcuggugcacgggagguggagcuauaucaggaugugcaaguuccugcgguacuucuuuuacaagaauuucgccuucacgcuggugcauuucugguauagcuucuuuaacggcuauuccgcccagacagccuacgaagauugguucaucacgcucuacaacgugcuguacaccagccugcccgugcugcugaugggccugcuggaccaggacguaagcgacaaacugagccugcgcuuucccgggcuguacaucgucggccagcgugaccuccuguucaacuauaagagguucuucgugucacugcugcacggcgugcugaccuccaugauccuguucuuuaucccccugggcgccuaccugcagaccgugggccaggacggggaagcccccucggauuaccagagcuucgccgucacaaucgcuagcgcgcucgugaucaccgugaauuuucagaucggccuggacacgagcuacuggaccuucgugaacgccuuuuccaucuuuggauccaucgcccuguacuuugggaucauguucgacuuccacagcgccggcauccacguccucuucccguccgcguuccaguucaccggcaccgccagcaacgcccugcggcagcccuauaucuggcugaccaucauccuggcuguggccgugugucugcugcccgugguagccaucagguuccuguccaugaccaucuggcccucagaguccgauaagauccagaaacacaggaagaggcugaaggccgaggagcaguggcagaggcgccagcaaguguuccgacggggcgugagcacccgcaggagcgcauacgccuucagccaccagaggggguacgccgaucugaucagcagcggucggagcauaaggaagaagaggagcccccuggacgccaucgucgccgaugggaccgccgaguacaggagaaccggcgacuccugauaauaggcuggagccucgguggccaugcuucuugccccuugggccuccccccagccccuccuccccuuccugcacccguacccccguggucuuugaauaaagucugagugggcggc

SEQ ID NO: 277 - RNA, 3919 nt, Artificial Sequence
  Synthetic Polynucleotide
gggaaauaagagagaaaagaagaguaagaagaaauauaagagccaccaugagcaccgagcgagacuccgagaccaccuucgacgaggacagccagcccaacgacgagguggugcccuacagcgacgacgagaccgaggacgagcuggacgaccagggcagcgccgucgagcccgagcaaaaccgcgucaacagggaggccgaggagaaucgggagcccuucaggaaagagugcaccuggcaggugaaggccaacgacaggaaguaccacgagcagccccacuucaugaauaccaaguuccugugcauaaaggagucgaaauacgccaauaacgccauaaagaccuacaaauacaacgccuucacguuuauccccaugaaccuguucgaacaguucaagcgcgccgccaaucuguacuuucuggcccugcugauccugcaggccgugccccagaucagcacccucgccugguacacaacccucgugccccuccuggugguccugggcgugacagccaucaaggaccugguggacgacguggccaggcacaagauggacaaggagauuaacaacaggaccugcgaggugaucaaggacggccgcuucaagguggccaaguggaaggagauccaggugggcgaugugaucaggcugaagaagaacgacuucgucccggccgacauccugcugcucuccuccuccgagcccaacucacucugcuacguggagaccgccgagcuugauggggagaccaaccucaaguucaagaugagccuggaaauaaccgaucaguaccugcagagggaagacacgcuggccaccuucgacggguucaucgagugcgaggagcccaacaaccggcuggacaaguucaccggcacccuguucuggaggaacaccucguucccccuggacgcggacaagauccugcugcgcggcugugugauccgaaacaccgacuuuugccauggacuggugaucuucgccggcgccgauaccaagaucaugaagaauuccgguaagaccagauucaagcgcacgaagaucgacuaucugaugaacuauaugguguauaccauauucguggugcugauccugcugagcgccgggcuggccaucggucacgccuauugggaggcccagguggggaacagcagcugguaccuguacgacggcgaggacgacacuccgagcuacaggggcuuccugaucuucuggggcuauaucauagugcuuaacaccaugguccccaucagucuguacguguccguggaagucaucaggcugggccaaagccacuuuaucaacugggaccugcagauguacuacgccgagaaggacacccccgccaaggcccguaccaccacccucaacgagcagcugggccagauccacuauaucuucucagacaagaccggcacgcugacccagaacauaaugaccuucaagaagugcugcaucaacggccagaucuacggggaucaucgggacgcgagccagcauaaccacaauaagaucgaacagguggacuucagcuggaacaccuaugccgauggcaagcucgccuucuacgaccacuaccugaucgagcagauccagagcggcaaagagccggaagugcgccaguucuucuuccugcucgcggugugccauaccguuaugguggauaggaccgacggccagcugaacuaucaggccgccagcccagacgagggcgcgcugguuaacgccgcccggaacuucggcuucgccuuucuggccaggacccagaacacuaucaccaucagcgaacugggcaccgagaggaccuacaacgugcucgccauucucgacuucaacuccgauaggaaaaggaugagcauaaucguaaggacccccgaagggaacaucaagcucuacugcaagggggccgacacagugaucuacgaaaggcugcaccggaugaaccccaccaagcaggagacccaggaugcccuggacaucuucgcuaacgagacccugaggacgcugugccugugcuauaaggagaucgaggagaaggaguucaccgaguggaauaagaaguucauggccgccagcguggcaagcacaaaucgggacgaagcccucgacaagguguacgaggagauugagaaggaccugauccuucucggcgccaccgccauagaggacaagcuucaggacgggguccccgagaccaucagcaaacucgccaaggccgacaucaagaucugggugcugaccggcgacaagaaggagaccgccgagaacauaggguucgccugcgagcugcucacagaggauaccaccaucugcuauggugaagauaucaacagucugcugcaugcccggauggaaaaccagcgaaacaggggcggggucuacgccaaauucgccccccccgugcaggagagcuucuuccccccuggagggaaucgcgcccugaucaucaccggcagcuggcugaacgagauccugcuggagaagaagaccaagcggaacaagauccucaagcugaaguuccccaggaccgaggaggaaaggaggaugcggacccaguccaagcggaggcuggaagccaagaaagagcagaggcagaagaacuuuguggaucuggccugcgagugcagcgccgugaucuguuguagggugaccccuaagcaaaaagcuaugguagucgaccugguuaagcgguacaagaaggccaucacccuggccaucggcgacggcgccaaugacgugaacaugaucaagaccgcccacaucggcgucgggaucuccggucaggagggcaugcaggccgugauguccagcgacuacagcuuugcccaguucagguaccugcagcgucugcugcucgugcauggccgguggagcuauaucaggaugugcaaguuucugagguacuucuucuacaagaacuucgccuuuacccuggugcauuucugguacagcuucuucaacggguacagcgcgcagaccgccuacgaggacugguucauuacccuguacaacgugcuguacacgagccugcccgugcugcugauggggcugcuggaccaggacgugagcgauaagcugucccuccgguucccggggcuguacaucgugggucaacgcgaccuccuguuuaacuacaaaagguucuucgucagccugcugcacggcguccugacgagcaugauccuguuuuucaucccccugggcgcguaccugcagaccgucggacaggauggggaggcccccuccgacuaucagagcuucgccgugacgaucgccagcgcccuggugaucaccgugaacuuccagaucggccuggacaccagcuacuggaccuucgugaacgccuucagcaucuucggcagcaucgcccuguacuucggaaucauguucgacuuccauagcgccggcauccacgugcuguuccccagcgcguuucaguucaccggcaccgccucgaacgcccugcggcagcccuacaucuggcugaccauaauucuggccguggccguuugccugcugcccgugguggccaucagguuucugagcaugacgaucuggccguccgaguccgacaagauacagaagcauaggaagcggcugaaggccgaggagcaguggcagcggaggcagcaggucuuucgccgaggggugagcacccggcggagcgccuacgccuucagccaccagaggggcuacgccgaucugaucagcagcgggaggagcauccgcaaaaaaaggagcccccuggacgccaucguggccgacggcaccgcggaauacaggcgcaccggggacagcugauaauaggcuggagccucgguggccaugcuucuugccccuugggccuccccccagccccuccuccccuuccugcacccguacccccguggucuuugaauaaagucugagugggcggc

SEQ ID NO: 278 - RNA, 3919 nt, Artificial Sequence
  Synthetic Polynucleotide
gggaaauaagagagaaaagaagaguaagaagaaauauaagagccaccaugagcacagagagggacagcgaaacaacguuugacgaggacucccagcccaacgacgagguggugcccuacuccgacgacgaaaccgaggacgagcucgacgaccagggcuccgccguggagccagagcagaacagggugaaccgugaggccgaggagaaccgggagcccuucaggaaggagugcaccuggcaagugaaggccaacgacaggaaguaccacgaacagccccacuucaugaacaccaaguuccugugcaucaaggagagcaaauacgccaauaacgccauaaagaccuacaaguauaacgccuucaccuuuauccccaugaaccuguucgagcaguucaagagggcagccaaccuguauuuccucgcccucuugauccugcaggccgugccccagaucagcacccuggccugguacacgacgcuggugccgcuccucguggugcugggcgugaccgccaucaaggaccugguggacgacguggcgcggcacaaaauggauaaggaaaucaacaaccggacgugugaagucaucaaggacggcagguucaaggucgcgaaguggaaggagauccaggugggcgacgugauccgacucaaaaagaacgacuucguaccggccgacauccugcugcucagcuccagcgagcccaacucccuuuguuacgucgagaccgccgagcuggacggcgagaccaaccucaaguucaagaugagccucgaaaucacggaccaguaucugcaacgcgaggacacccucgccaccuucgacggcuucauugagugcgaggaaccgaacaacaggcuggacaaguucaccgggacccuguucuggcgaaauaccuccuucccccuggacgccgacaagauacugcugagggggugcguaauccggaacaccgacuucugccauggccuggugaucuucgccggcgcggacaccaagauaaugaagaacagcgggaagacccguuucaagcggaccaaaaucgacuaccugaugaauuacaugguguacaccaucuuugucgugcucauccuucucuccgccggccuggccaucggccacgccuauugggaggcccagguggggaacagcuccugguaucuguacgacggcgaagacgauacgccgagcuaccgaggcuuccugaucuuuuggggcuacaucauagugcugaauaccaugguacccaucucccucuacguguccguggaggugauccggcugggccagucccacuucaucaauugggaccugcagauguacuacgcugagaaggacacccccgccaaagcccgcaccaccacccugaaugagcagcugggccagauccacuacaucuuuagcgauaagaccggcacacugacccagaacaucaugaccuucaaaaagugcugcaucaacgggcagaucuacggcgaccacagggacgccagccaacacaaccacaacaagauugagcagguggacuucagcuggaauaccuacgccgacgggaagcucgccuucuacgaucacuaccucaucgagcaaauccaguccggcaaggagcccgaggugcgccaauuuuucuuucugcucgccgugugccacaccgucaugguggacaggaccgacgggcagcugaacuaucaggccgccucccccgacgagggcgcccuggugaacgccgcccgcaacuucggauucgccuuccuggccaggacccagaacaccauaacgaucagcgaacugggcaccgagcgcaccuacaacgugcuggccauccuggauuuuaacuccgaccggaagaggaugagcaucaucgugcguacccccgagggaaacaucaagcuguacugcaagggcgccgacaccgugauuuacgagaggcugcaccgcaugaaccccaccaaacaggagacccaggaugcccuggacauauucgcuaacgagacccugcggacccugugucugugcuacaaggaaauagaggagaaagaguucaccgaguggaacaagaaguucauggcggccuccguggcgagcacgaaccgggaugaggcccucgacaaggucuacgaggagaucgagaaagaucugauccuccugggugccacagccauagaggacaagcugcaggacggcgugcccgagaccaucucgaagcuggccaaggccgacaucaagaucuggguccugaccggggacaaaaaggagaccgccgagaacaucgguuucgccugugagcugcugaccgaagauaccaccaucugcuacggcgaggauaucaacucccugcugcacgcgcggauggagaaccagcgcaacaggggcgggguguacgccaaguuugcccccccggugcaagaguccuucuucccgcccgggggcaaccgggcgcugaucaucaccggcagcuggcugaacgagauccugcuggaaaaaaaaaccaagcgcaacaagauccugaagcugaaguuccccaggaccgaggaggagcggagaaugagaacccaguccaagcggcgacuggaggccaagaaggaacagaggcagaagaacuucguggaccuggccugcgagugcuccgccgucauuugcugccgggugaccccuaagcagaaggccauggugguggaccugguaaagcgguacaagaaagccaucacccucgcaaucggcgacggcgccaacgacgugaacaugaucaagaccgcccacaucggcguggggaucagcggccaagagggcaugcaagccgugauguccagcgacuacuccuucgcccaguuucgauaccugcagcggcugcugcuggugcacggccgguggagcuacaucaggaugugcaaguuucugcgguacuucuucuacaaaaacuucgccuucacacuggugcacuucugguauagcuucuucaauggguacagcgcccagaccgccuacgaggacugguucauaacccuguacaacgugcuguacaccagccugcccgugcugcucaugggucugcuggaccaggacgugagcgauaagcugagccugcgguuccccggccuguacaucgugggccagcgcgaucugcuguuuaacuacaaaagguucuucgugagccugcugcacggcguccucaccagcaugauccucuucuucauaccccugggcgccuaccugcagaccgugggacaggauggggaggcccccagcgacuaccagagcuuugccgugaccaucgccagcgcccucgucaucaccgugaacuuccagaucgggcucgauaccucauacuggaccuucgugaacgccuucuccaucuucggcucgaucgcccuguacuuugggaucauguucgacuuccacagcgccggaauccacguccuguuccccagcgccuuucaguucacagguaccgcuagcaaugcgcuccggcagcccuacaucuggcucaccaucauccuggccgucgcagugugucugcuccccgugguggccauccgguuucugagcaugacgaucuggcccuccgagagcgacaagauccagaagcacaggaagaggcucaaggcggaggaacaauggcagcgcaggcagcagguguuccggaggggcgucuccaccagacgcagcgccuaugccuucagccaccagcgaggcuaugccgaucugaucuccaguggcaggagcauccgaaagaagcguuccccacuggaugccaucguggccgacggcacggcggaguacaggaggaccggcgacagcugauaauaggcuggagccucgguggccaugcuucuugccccuugggccuccccccagccccuccuccccuuccugcacccguacccccguggucuuugaauaaagucugagugggcggc

SEQ ID NO: 279 - RNA, 3919 nt, Artificial Sequence
  Synthetic Polynucleotide
gggaaauaagagagaaaagaagaguaagaagaaauauaagagccaccaugaguaccgagcgggacucugaaaccaccuucgacgaagauagccagcccaacgacgagguggugccguacagcgacgacgagaccgaggacgaacuggacgaucagggcagcgccguggagcccgagcagaaccgggucaaccgggaagccgaggagaaccgcgagcccuuccggaaggaauguaccuggcaggugaaggccaacgacaggaaguaccaugagcagccccacuucaugaauaccaaauuccugugcauaaaggagagcaaguacgccaacaaugccaucaaaaccuacaaauacaacgccuucaccuuuaucccgaugaaccuguucgaacaguucaaaagagccgcaaaccuguacuuccuggcccugcucauccugcaggccgucccccagaucagcacccuugccugguacacaacccuggucccccugcugguggugcuggggguaaccgccaucaaggaccuggucgacgauguggccaggcacaagauggacaaggagaucaacaacaggaccugcgaggucaucaaggacggccgguucaagguggccaaguggaaggagauccagguuggggacgugauuaggcucaagaagaacgacuuugugcccgccgacauacugcuucugagcuccagcgagcccaacucccugugcuauguggagaccgccgagcuggauggcgagaccaaccugaaguuuaagaugucccuggagaucaccgaccaauaccugcagagggaggauacccuggccaccuucgacggguucaucgagugcgaagagccgaacaacaggcuggacaaguucaccggcacccuguuuuggaggaacaccuccuuuccccuggacgccgacaagauccugcucaggggaugcgucaucaggaacaccgacuucugccacggccuggugaucuucgccggcgccgacaccaagaucaugaagaacuccggcaagacccgcuucaagcgcaccaagaucgacuaccugaugaacuacauggucuacacgaucuucgugguucugauccugcuuuccgcaggacucgccauaggccacgccuacugggaggcccagguggguaacuccagcugguaccuguaugacggcgaagacgacacccccagcuaccgcggcuuccugaucuucuggggcuacaucaucgugcugaacaccaugguucccaucucccuguacguguccgucgaagugauuaggcuggggcagagccacuucaucaacugggaccugcagauguacuaugccgagaaagacacccccgccaaggccaggaccaccacgcugaacgagcaacugggccagauccauuauaucuucagcgacaagaccgggacgcucacccagaauaucaugaccuucaagaaguguugcaucaacgggcagaucuacggcgaccacagggaugccucccagcacaaccauaacaagaucgaacagguggacuucucguggaacaccuacgccgacggcaagcucgcguuuuacgaccauuaccugaucgagcagauccaguccggcaaggagccggaggugaggcaauucuucuuccugcucgccgucugccacaccgugaugguggaccgaaccgacggccaacugaacuaucaggccgccucgccggaugagggcgcccuggugaaugcggcccggaacuucggcuucgccuuccuggcccgaacccaaaacaccaucaccaucagcgaacugggcaccgagcgcaccuauaacgugcuggccauccuggauuuuaacagcgacaggaagaggaugagcaucaucgucaggacccccgaggggaauaucaagcucuauugcaagggggccgacaccgugaucuaugagaggcugcaccgaaugaauccaacgaaacaggagacccaagacgcccuggacaucuucgccaacgaaacccugaggacccugugccugugcuauaaggaaaucgaggagaaagaguucaccgaguggaauaagaaguucauggccgccuccguggccagcaccaauagggacgaggcccuggacaaaguguacgaggagaucgagaaggaccugauccugcugggcgccacggccauugaagauaagcugcaggauggcgugcccgagacaaucuccaagcuggccaaggccgacaucaaaaucuggguguugaccggggauaagaaagagacagccgagaacaucggcuucgccugcgagcugcugacggaggacaccaccaucuguuacggcgaggacaucaacagccugcuccacgccaggauggagaaccagaggaacaggggcggcguguacgccaaauuugccccccccguccaggaguccuucuucccccccggagggaaccgggcccugaucaucaccggcuccuggcuuaacgagauucugcuggagaaaaagacgaagcgcaacaagauucugaagcucaaguucccgcggaccgaggaggagaggcggaugcggacgcagagcaaacggcggcuggaggccaagaaggagcaaaggcagaagaauuucguggaccucgccugcgaaugcagcgccguaauaugcugucgcgucacccccaagcagaaggccauggugguagaccuggugaagagguacaagaaggccaucacccuggccaucggcgacggcgccaacgauguuaacaugaucaagaccgcccacauuggugugggcaucuccggccaagaagguaugcaggccgugaugagcagcgacuauuccuucgcccaguuccgcuaccugcagcgccuguugcugguccacggcaggugguccuauaucaggauguguaaguuucugagguacuucuucuacaagaauuucgccuucacccuggugcacuuuugguacagcuucuucaacggcuacagcgcgcagaccgccuacgaagacugguucaucacccuguacaacgugcuguacaccucccugcccgugcugcucaugggccugcuggaccaggacgugagcgacaagcugagccucagguuucccggccuguacauuguggggcagcgggaccuccuguuuaacuauaaaagguuuuucguaucccugcugcacggcgugcucaccucgaugauccucuucuuuaucccccucggcgccuaccugcagaccgucggccaggacggcgaagcccccagcgacuaccaguccuucgcggugaccaucgccagcgcccucgugaucaccgugaacuuccagaucgggcuggauaccagcuacuggaccuucguaaacgccuucagcaucuucgguucgaucgcgcuguacuucggcaucauguucgacuuucacagcgccggcauccacguccuguuucccagcgccuuccaguucaccgguaccgccagcaacgcacugcgccagcccuauaucugguugaccaucauccuggcgguggccgugugccugcugcccguggucgcaaucagguuccugagcaugaccauauggcccuccgagagcgacaagauacaaaagcacaggaagcgucugaaggccgaagaacaguggcagcgccgucagcagguguucaggcgaggcgugucgacccggcgguccgccuacgccuucagccaccagaggggcuaugccgaucugaucagcagcgggcggagcaucaggaagaagcgcuccccgcuggacgccaucguggccgacgggaccgccgaguaucggaggaccggcgacagcugauaauaggcuggagccucgguggccaugcuucuugccccuugggccuccccccagccccuccuccccuuccugcacccguacccccguggucuuugaauaaagucugagugggcggc

SEQ ID NO: 280 - RNA, 3919 nt, Artificial Sequence
  Synthetic Polynucleotide
gggaaauaagagagaaaagaagaguaagaagaaauauaagagccaccaugagcacugagagggauuccgagaccaccuucgacgaggacucccagcccaacgacgagguggugccguacuccgacgacgagacggaggacgagcuggacgaccagggcagcgccgucgagccugaacagaaccgcgucaaucgggaggccgaggagaaccgagagccguuccggaaggagugcaccuggcaggugaaggccaacgaccggaaguaccacgagcagccccacuucaugaauaccaaguuccucugcaucaaggaguccaaguaugcgaacaaugccaucaagaccuacaaguacaacgccuuuaccuucauacccaugaaccucuuugagcaguuuaagagggccgccaaccuguacuuccuugcccugcugauccugcaggcagugccccagaucagcacccucgccugguauaccacccuggugccccuccugguggugcugggcgugaccgccaucaaggaccugguggaugacguggcgaggcacaagauggacaaggagauaaacaaccgcaccugugaggugaucaaggacggacgguucaagguggccaaguggaaagagauccaggugggcgacgucauccggcucaagaagaaugacuucgugcccgcggacauucugcugcuguccuccuccgagccgaacagccuguguuauguugagaccgccgagcuggacggcgagaccaaccugaaguucaagaugagucuggagaucaccgaccaguaccugcagcgugaggacacucucgccacauucgacggauucaucgagugcgaggagcccaacaaucgucucgacaaguucaccggcacccuguucuggcgcaacacgagcuucccccuggacgccgacaagauccuucugagggguugcgugauccgcaacaccgacuucugucacggccuggugaucuucgcuggcgccgacaccaagaucaugaagaacuccggaaagaccagguuuaagcggacgaagaucgacuaccugaugaacuacaugguguacacuaucuuuguggugcugauccugcuguccgccggacuggccauuggccacgccuacugggaagcccaggugggcaacuccagcugguaccuguacgacggcgaggacgacacgcccagcuauaggggcuuccugaucuuuuggggguacauaaucguccugaacaccauggugcccaucagccuguacguguccguggaagucauccgucugggccagucgcacuucaucaacugggaccugcagauguacuacgccgaaaaggauacgcccgccaaggccaggaccacgacccugaaugagcagcuggggcagauccacuacauauucagcgauaaaaccgggacccucacucaaaacaucaugaccuucaaaaaaugcugcaucaacggccagaucuauggcgaccaccgcgacgccagccagcauaaccauaauaagauugaacagguggacuucucguggaauaccuacgccgacggcaaacuggccuuuuaugaccacuaucugaucgaacagauccaaagcggcaaggagcccgaagugaggcaguucuucuuccugcucgccgugugccacaccgugaugguggacaggaccgacggccagcuaaacuaccaggccgccagcccggacgagggcgcccuggugaacgccgcccgcaacuucggcuucgccuuccucgccaggacucagaauaccaucacgaucagcgagcugggcaccgagagaaccuacaacgugcuggccauccuggacuucaacagcgacaggaagaggaugagcauuaucgugaggacaccagaggggaacaucaaacucuacugcaagggcgccgauaccgugaucuacgagaggcugcaccgcaugaaccccaccaagcaggaaacccaggacgcccuggacaucuucgccaacgagacgcucaggacccugugccugugcuacaaagagauagaggaaaaggaguucaccgaguggaacaagaaguucauggccgcgagcguggccucgaccaaccgggacgaggcccuggacaaggucuacgaggaaauugagaaggaccucauacugcucggcgcaaccgcaaucgaagacaagcugcaggacggagugcccgagaccaucagcaaacuggccaaggcagacaucaagaucugggugcugacgggggacaagaaggagaccgccgaaaacaucggcuucgccugcgagcugcugaccgaggauaccacgauuugcuacggcgaagauaucaacagccugcugcacgccaggauggagaaccagcgaaacaggggcggcguguacgccaaguuugccccccccguccaagagagcuucuuuccccccgggggcaacagggcccucaucaucaccggcuccuggcugaacgagauccugcuggagaagaagaccaagaggaacaaaauacugaagcugaaguucccgagaaccgaggaggagaggaggaugcggacccagagcaagaggcggcucgaggccaagaaggagcagaggcagaagaacuucguggaccucgccugugagugcucggccgugaucugcugcagagugacacccaagcagaaggccauggucguggaccuggugaagcgguacaagaaagccauaacccucgccauaggcgauggcgccaacgacgugaacaugaucaagaccgcacacaucggcgugggcauaagcggccaggagggcaugcaggccgucauguccagcgacuauuccuuugcccaguuccgguaucugcagaggcuccuccuggugcacggacgcugguccuacauccgcaugugcaaguuucugagguacuucuucuacaagaacuucgccuucacgcuggugcacuucugguacagcuucuucaacggguauuccgcccagaccgccuacgaggacugguucaucacccuguacaacgugcuguacaccucccugcccgugcugcugauggggcugcuggaccaagacguguccgacaagcugucccugcgauuccccggccuguacaucguggggcagagggaccuccuguucaacuacaagcgguucuuugugagccuguuacacggcgugcugaccagcaugauccuauucuucauuccccugggcgccuaccugcagaccgugggccaggacggagaagcgcccagcgacuaccagucguucgccgugaccaucgccucggcccuggugauuaccgugaacuuucaaaucggccuggacaccagcuacuggacguucgugaacgccuucagcaucuucggcuccaucgcacuguauuucggcauuauguucgauuuccacucugccggcauccacgugcuguuccccagcgccuuccaguucaccggcacggccagcaaugcgcugaggcagccguacaucuggcugaccaucauacuggccguagccgugugccugcuucccgugguggccaucagguuccuguccaugacgaucuggcccagcgagagcgacaagauucagaagcaccggaaaaggcugaaggccgaggagcaguggcagaggaggcagcaaguguuucgaaggggggucagcacccggagguccgcguaugccuucucccaccagaggggguaugcggaccugaucuccagcggccggagcaucaggaagaagaggagcccccucgacgccaucguggcugacggcacagccgaguacaggaggaccggagauuccugauaauaggcuggagccucgguggccaugcuucuugccccuugggccuccccccagccccuccuccccuuccugcacccguacccccguggucuuugaauaaagucugagugggcggc

SEQ ID NO: 281 - RNA, 3919 nt, Artificial Sequence
  Synthetic Polynucleotide
gggaaauaagagagaaaagaagaguaagaagaaauauaagagccaccaugagcacggagagggacuccgagacgaccuucgacgaggacucccagcccaacgacgaggucgugcccuacuccgacgacgagaccgaggacgagcuggacgaucaaggcagcgcggucgagcccgagcagaacagggucaaccgagaggcggaggagaacagggagcccuuccggaaagagugcaccuggcaggugaaggccaacgaccggaaguaccaugaacagccccauuucaugaacaccaaguuucugugcauaaaagagagcaaauacgcaaacaacgccaucaagacauacaaguacaacgccuucaccuucauccccaugaaccuguucgagcaguucaagcgggccgccaaccucuacuuccuggcccugcugauccuccaggccgugccccaaaucagcacccucgcgugguacaccacccugguaccccugcuggucgugcucggagugaccgccaucaaggaccugguggacgacgucgcccgccacaagauggacaaggagaucaacaaccggaccugcgaagugauaaaggacggaagguucaaggucgccaaguggaaagagauacagguaggggaugugauucgacugaaaaagaacgacuucgugccugccgacauccugcugcugagcagcucggagcccaauagccucugcuacguggagacugccgagcuggacggcgaaaccaaccugaaguucaagaugucccuggagaucaccgaucaguaccugcagcgcgaggacacccuggccaccuuugauggguucauagaaugcgaggagcccaacaacaggcuggacaaauucaccgguacccuguucuggaggaacacauccuucccccuggacgccgacaagauccugcugcgggguugugugaucaggaacaccgacuucugccacgggcucgucaucuucgccggggcggacacuaagauuaugaagaauagcgggaagacccgguucaagaggaccaagaucgacuaccugaugaacuacaugguguacaccaucuuugugguccugauccugcuguccgccgggcuggccaucggccacgccuacugggaagcccaagugggcaacagcagcugguaucucuacgacggcgaggacgauacccccagcuaucgaggcuuucugaucuuuuggggguacauuaucgugcugaauaccauggugcccaucagccucuacgugagcguggaggugauccggcugggacagagccauuuuaucaacugggaccugcaaauguacuacgccgagaaagacacgcccgccaaggccagaaccaccacccugaaugagcagcugggccagauccacuacaucuuuuccgacaagaccggcacccugacccagaacaucaugaccuucaaaaaaugcugcauaaacggccaaaucuacggcgaucacagggaugccucccagcacaaucacaacaagaucgagcagguggauuucuccuggaacaccuacgccgacggcaagcuggccuuuuacgaccacuaccugauugaacagauccagagcgggaaggaacccgaggugcggcaguucuucuuccugcuggccgucugccauacggugaugguggacaggaccgacggccagcugaacuaccaggccgccagccccgacgagggcgcccuggucaaugccgcccggaauuucggcuucgccuuccuggcccgaacccagaacaccaucaccaucagcgagcuaggcaccgagaggaccuacaacgugcucgccauccuggacuucaacuccgauaggaagaggaugagcaucaucgugaggacgccggaggggaacaucaagcucuacuguaagggcgccgacaccgugaucuacgagaggcugcacaggaugaaccccacaaaacaggagacccaagaugcccuggacaucuucgccaacgagacucugcggacccugugccugugcuacaaggagaucgaggagaaggaguucaccgaguggaacaagaaguucauggcggccagcguggccucuaccaaccgggacgaggcacuggauaaaguguacgaagagaucgagaaagaucugauccugcugggcgccacggccaucgaggacaaacugcaggacggugucccggagaccaucuccaaauuggccaaagccgacaucaagaucugggugcugaccggagauaaaaaagagacagccgaaaacauaggguuugccugcgagcugcugaccgaggauaccaccaucugcuacggggaggacaucaacucccuccugcacgcccggauggagaaccagcgcaaccggggcggcguguacgccaaguucgccccucccgugcaagagagcuucuucccgccaggaggcaaccgugcccucaucauaaccggcagcuggcuuaacgagauacugcuggagaagaagaccaagcgcaacaaaauccucaaacugaaauucccccggacagaggaggagcgaaggaugcggacgcaguccaagaggcgguuagaggccaagaaggagcagaggcagaagaacuucguggaucuggccugcgagugcuccgccgugauaugcugccgggugacccccaaacaaaaagcgauggugguggaccuggugaaaagauauaagaaagcgaucacccuggccaucggggacggcgcgaacgacgugaacaugauuaaaaccgcccacaucggggugggcaucuccggccaggaggggaugcaggccgugauguccuccgacuacuccuuugcccaguuccgguacuugcagaggcugcugcuggugcacgggagguggagcuacaucaggaugugcaaguuccugcgcuacuucuucuacaaaaacuuugccuucacucuugugcauuuuugguauagcuuuuucaacggguacagcgcccagaccgccuacgaggacugguucaucacccuguacaacgugcuguacaccucccuccccguccuucugaugggccugcuggaccaagacgugagcgacaaacugucgcugcguuuucccggccuguacauugugggccagcgggaccugcucuuuaacuacaagcgcuucuucgugucccugcugcacgggguccugaccagcaugauacuguucuucauuccccugggggccuaccugcagaccguaggacaggacggcgaggcgcccuccgauuaccagagcuucgccgugaccaucgccagcgcccuggucauaaccgugaauuuucaaaucggccucgacaccagcuauuggaccuucgucaacgccuuuagcaucuuuggguccaucgcgcuuuacuucggcaucauguucgacuuccacagcgccggcauccacgugcucuuccccagcgccuuccaguucaccggcaccgccagcaacgcccuccggcagcccuauaucuggcugaccaucauccucgccguggccgugugccugcugcccgugguggccauaagguuccugagcaugaccaucuggccuagcgaguccgacaaaauccagaagcaucgcaagcggcugaaggccgaggagcaguggcaacggagacagcagguguucaggaggggggugucaacccggcggagcgccuaugccuucagccaccagaggggguacgccgaccucaucagcagugguaggagcaucaggaaaaagagguccccccucgacgccaucgucgccgauggcaccgccgaguauaggaggaccggcgacuccugauaauaggcuggagccucgguggccaugcuucuugccccuugggccuccccccagccccuccuccccuuccugcacccguacccccguggucuuugaauaaagucugagugggcggc

SEQ ID NO: 282 - RNA, 3919 nt, Artificial Sequence
  Synthetic Polynucleotide
gggaaauaagagagaaaagaagaguaagaagaaauauaagagccaccaugucgaccgagagggacagcgagaccacuuucgacgaggacucccaacccaacgacgaggugguccccuacagcgacgacgagaccgaagacgaacuggacgaccagggcuccgccguggagcccgagcagaacagggugaaccgcgaggcggaagagaacagggagcccuucaggaaagagugcaccuggcaagugaaggccaaugaccgaaaguaccacgagcagccccauuucaugaauaccaaauuccugugcaucaaggaguccaaguacgccaacaacgccauaaaaaccuacaaguacaacgccuucaccuucauccccaugaaccuguucgagcaguuuaagcgggccgccaaccuguacuuccuggcccugcugauccuccaggccgugccccagaucuccacccuggcgugguacaccacccuggugccccugcuggugguccugggcgugaccgccaucaaggaccugguggacgacguggcccgacacaagauggauaaggagaucaacaaccgaaccugcgaggugaucaaggauggccgguucaagguggcuaaguggaaagagauccaggugggggacgugauccggcucaagaagaaugacuucguccccgccgacauccuucugcugagcagcagcgagccgaauagccugugcuacguggagaccgccgagcuugacggcgagaccaaccucaaauucaagaugucccuggagaucaccgaccaguaucugcagcgcgaggauacccuggccaccuucgauggcuucaucgagugcgaggagcccaacaacaggcuggacaaguucaccggcacucuguucuggaggaacaccuccuuuccccuggacgccgauaagauccugcugcgggggugcgugaucaggaauacagauuuuugccacggccuggugaucuucgccggcgccgacaccaagaucaugaaaaacagcggcaagacccguuucaagcggaccaagaucgacuaccugaugaacuacauggucuacaccaucuucguugugcugauccugcugagcgccgggcuggccaucgggcaugccuauugggaggcccaggugggcaacagcagcugguaccuguaugacggggaggaugauacgcccuccuaccgcggcuuccugaucuucuggggauacaucaucguucugaacaccaugguccccaucucgcuguacgugagcguggaggugauccggcuggggcagucccacuucaucaacugggaccugcagauguacuacgccgagaaggacacccccgcgaaggcccgcaccacgacgcugaaugagcagcugggccagauccacuacauuuucagcgauaagaccggaacgcuaacccagaacaucaugaccuucaagaagugcuguaucaacgggcagaucuacggcgaccaccgggacgccucacagcacaaccacaauaagaucgagcaggucgacuucuccuggaauaccuacgccgacgggaagcuggcguucuacgaccacuaucuaaucgaacaaauccagagcggcaaggagcccgagguccggcaguuuuucuuccugcucgccgugugucauaccgugaugguggauaggaccgauggucagcugaacuaccaggccgccagccccgaugagggcgcccuggugaaugcggcgcgcaacuucggguucgccuucuuagcccggacccagaacaccaucaccaucucagagcuggggaccgagaggaccuauaaugugcuggccauccucgacuuuaauuccgaucggaagcguaugagcauaauugugcguacacccgagggaaacaucaagcuguauugcaaaggcgcugacacggucaucuacgagcgacugcaccggaugaaccccaccaaacaggagacgcaggacgcccuggacaucuucgccaacgaaacccucaggacccugugccucugcuacaaagaaaucgaagaaaaggaguucacugaguggaauaagaaguucauggcggccagcguggccagcaccaaccgggacgaagcacuggacaagguguacgaggagaucgagaaggacuugauccugcugggcgccacggccaucgaggacaagcugcaagacggggugcccgaaaccaucagcaagcuggccaaggccgauaucaagauaugggugcugaccggcgacaagaaggagaccgccgagaacaucggcuucgccugcgagcugcucaccgaggauacgaccaucugcuacggcgaggacaucaacagccugcugcacgcucgaauggagaaccagcgaaauagggggggcgucuacgccaaguuugccccccccgugcaagagucguucuucccccccgguggcaacagggcccugauaaucaccggcuccuggcugaacgagauccugcuggagaagaagaccaagcgcaacaagauccugaagcugaaguuuccgcguaccgaggaagagcgcaggaugcgcacccaaucaaagaggaggcucgaggccaagaaggagcagcggcagaagaauuuuguggaucuggccugcgaguguuccgcugugaucugcugccgggugacccccaaacagaaagccauggucguggaccuggugaagagguacaagaaagcgaucacgcuggccaucggugauggggccaacgacgugaacaugaucaagaccgcccacaucggcgugggcaucuccgggcaggagggcaugcaggccgucauguccagcgacuacucauucgcccaguuccgauaccugcagcgccuccugcuggugcacggcagguggagcuacauccggaugugcaaauuccugagguacuucuucuacaaaaacuucgccuucacccucgugcauuucugguacagcuucuucaauggcuauuccgcccagacugccuacgaagacugguucaucacucucuacaacguccuguacaccagccugcccguccugcugaugggacugcuggaucaggauguguccgacaagcugagccucagguuccccggccuguauaucgugggccagcgcgaccugcuguucaacuacaagagguucuucgugagccugcugcacggcgugcugacuagcaugauccuguucuucaucccccugggggccuaccugcagacagugggccaggacggggaggcccccagcgacuaucagucuuucgccguaaccauagccuccgcgcuggugaucaccgugaacuuccagaucggccuggacaccuccuacuggaccuuugugaacgcuuuuagcaucuuuggcagcauugcccuguacuuuggcaucauguuugacuuucacagcgccgggauucaugugcuguuccccagcgccuuucaguucacgggcaccgccagcaacgcccugcggcagcccuauaucuggcugaccaucauccuggccguggccgucugccugcugcccgugguggccauccgguuccucagcaugaccaucuggcccuccgagagcgauaaaauccagaaacaucgaaagcggcugaaggccgaggagcaguggcaaaggcggcagcagguguuccggaggggggucagcacccgccgguccgccuacgccuuuucccaucaaaggggguacgccgaucugaucuccuccgggcggagcaucaggaagaagagguccccgcuggacgccaucguggccgacggcaccgccgaguaccggaggaccggagacagcugauaauaggcuggagccucgguggccaugcuucuugccccuugggccuccccccagccccuccuccccuuccugcacccguacccccguggucuuugaauaaagucugagugggcggc

SEQ ID NO: 283 - DNA, 18 bp, Artificial Sequence
  Synthetic Polynucleotide
attgggcacccgtaaggg

SEQ ID NO: 284 - RNA, 3858 nt, Artificial Sequence; identical to SEQ ID NO: 42
  Synthetic Polynucleotide

SEQ ID NO: 285 - RNA, 3882 nt, Artificial Sequence; identical to SEQ ID NO: 45
  Synthetic Polynucleotide

SEQ ID NO: 286 - RNA, 3861 nt, Artificial Sequence; identical to SEQ ID NO: 48
  Synthetic Polynucleotide

SEQ ID NO: 287 - RNA, 57 nt, Artificial Sequence
  Synthetic Polynucleotide
gggaaauaagagagaaaagaagaguaagaagaaauauaagaccccggcgccgccacc

SEQ ID NO: 288 - RNA, 54 nt, Artificial Sequence
  Synthetic Polynucleotide
gggaaauaagagagaaaagaagaguaagaagaaauauaagaccccggcgccacc

SEQ ID NO: 289 - RNA, 7 nt, Artificial Sequence
  Synthetic Polynucleotide
gccagcc

SEQ ID NO: 290 - RNA, 6 nt, Artificial Sequence
  Synthetic Polynucleotide
gccgcc

SEQ ID NO: 291 - RNA, 10 nt, Artificial Sequence
  Synthetic Polynucleotide
ccccggcgcc

SEQ ID NO: 292 - RNA, 7 nt, Artificial Sequence
  Synthetic Polynucleotide
ccccggc

SEQ ID NO: 293 - RNA, 3837 nt, Artificial Sequence; identical to SEQ ID NO: 66
  Synthetic Polynucleotide

SEQ ID NO: 294 - RNA, 30 nt, Artificial Sequence
  Synthetic Polynucleotide
  misc_feature (4)..(30): may be absent
ccgccgccgccgccgccgccgccgccgccg

SEQ ID NO: 295 - RNA, 30 nt, Artificial Sequence
  Synthetic Polynucleotide
  misc_feature (4)..(30): may be absent
gccgccgccgccgccgccgccgccgccgcc

1. A composition comprising a modified polynucleotide having an open reading frame (ORF) encoding ATP binding cassette subfamily B member 4 (ABCB4) formulated in a lipid nanoparticle (LNP) carrier.

2. The composition of claim 1, wherein the ABCB4 polynucleotide comprises at least one chemically modified nucleobase, sugar, backbone, or any combination thereof

3. The composition of claims 1-2, wherein the modified polynucleotide comprises at least one modified nucleoside.

4. The composition of claim 2, wherein the at least one modified nucleoside is selected from the group consisting of: pseudouridine, 1-methyl-pseudouridine, 5-methylcytidine, 5-methyluridine, 2′-O-methyluridine, 2-thiouridine, 5-methoxyuridine and N6-methyladenosine.

5. The composition of claim 3, wherein the at least one modified nucleoside is a 5-methoxyuridine.

6. The composition of claim 4, wherein at least 30% of the uridine residues are 5-methoxyuridines.

7. The composition of any of the preceding claims, wherein the modified polynucleotide comprises a poly-A region, a Kozak sequence, a 3′ untranslated region, a 5′ untranslated region, an miRNA binding site, or any combination thereof.

8. The composition of claim 6, wherein the miRNA binding site is a miR-142 binding site.

9. The composition of claim 1, wherein the uracil or thymine content of the ORF relative to the theoretical minimum uracil or thymine content of a nucleotide sequence encoding the ABCB4 polypeptide (%UTM or %TTM), is between about 100% and about 150%.

10. The composition of any one of the preceding claims, wherein the ORF further comprises at least one low-frequency codon.

11. The composition of any one of the preceding claims, wherein the ORF is
a) at least 92% identical to ABCB4-CO13, ABCB4-CO22, or ABCB4-CO9, or
b) at least 91% identical to ABCB4-CO1, ABCB4-CO2, ABCB4-CO3, ABCB4-CO4, ABCB4-CO5, ABCB4-CO6, ABCB4-CO10, ABCB4-CO11, ABCB4-CO12, ABCB4-CO15, ABCB4-CO16, ABCB4-CO17, ABCB4-CO20, ABCB4-CO21, ABCB4-CO23, ABCB4-CO24, ABCB4-CO25, or ABCB4-CO26, or
c) at least 90% identical to ABCB4-CO7, ABCB4-CO8, ABCB4-CO14, ABCB4-CO18, or ABCB4-CO19.

12. The composition of any one of the preceding claims, wherein the LNP comprises an ionizable amino lipid.

13. The composition of claim 12, wherein the ionizable amino lipid is compound 1.

14. A polynucleotide comprising an ORF,
a) wherein the ORF is at least 92% identical to ABCB4-CO13, ABCB4-CO22, or ABCB4-CO9,
b) wherein the ORF is at least 91% identical to ABCB4-CO1, ABCB4-CO2, ABCB4-CO3, ABCB4-CO4, ABCB4-CO5, ABCB4-CO6, ABCB4-CO10, ABCB4-CO11, ABCB4-CO12, ABCB4-CO15, ABCB4-CO16, ABCB4-CO17, ABCB4-CO20, ABCB4-CO21, ABCB4-CO23, ABCB4-CO24, ABCB4-CO25, or ABCB4-CO26, or
c) wherein the ORF is at least 90% identical to ABCB4-CO7, ABCB4-CO8, ABCB4-CO14, ABCB4-CO18, or ABCB4-CO19.

15. The composition of any one of the preceding claims, wherein the ABCB4 polypeptide comprises an amino acid sequence at least about 95% identical to (a) the polypeptide sequence of wild type ABCB4, isoform 1, (b) the polypeptide sequence of wild type ABCB4, isoform 2, or (c) the polypeptide sequence of wild type ABCB4, isoform 3, wherein the ABCB4 polypeptide has phosphatidylcholine translocation activity.

16. The composition of claim 15, wherein the ABCB4 polypeptide is a variant, derivative, or mutant having phosphatidylcholine translocation activity.

17. The composition of any one of the preceding claims, wherein the polynucleotide encodes an ABCB4 polypeptide fused to one or more heterologous polypeptides.

18. The composition of claim 17 wherein the one or more heterologous polypeptides increase a pharmacokinetic property of the ABCB4 polypeptide.

19. The composition of any one of the preceding claims, wherein, upon administration to a subject, the polynucleotide has: (a) a longer plasma half-life; (b) increased expression of an ABCB4 polypeptide encoded by the ORF; (c) a lower frequency of arrested translation resulting in an expression fragment; (d) greater structural stability; or (e) any combination thereof,
relative to a corresponding polynucleotide comprising ABCB4, isoform 1, ABCB4, isoform 2, or ABCB4, isoform 3.

20. A method of producing a polynucleotide having an open reading frame (ORF) encoding ATP binding cassette subfamily B member 4 (ABCB4), comprising modifying an ORF encoding an ABCB4 polypeptide by performing at least one synonymous substitution.

21. The method of claim 20 further comprising replacing at least 90% of uridine residues with 5-methoxyuridine.

22. A method of treating or preventing progressive familial intrahepatic choleostasis type 3 (PFIC3) in a patient in need thereof comprising administering to the patient a therapeutically effective amount of a composition comprising a modified mRNA molecule encoding an ABCB4 polypeptide.

23. The method of claim 22, wherein the modified mRNA molecules comprises at least one modified nucleoside.

24. The method of claim 23, wherein the at least one modified nucleoside is selected from the group consisting of: pseudouridine, 1-methyl-pseudouridine, 5-methylcytidine, 5-methyluridine, 2′-O-methyluridine, 2-thiouridine, 5-methoxyuridine and N6-methyladenosine.

25. The method of claim 24, wherein the at least one modified nucleoside is a 5-methoxyuridine.

26. The method of claims 24-25, wherein the modified mRNA molecule is formulated in a cationic lipid nanoparticle.

27. A method of treating PFIC2 or BRIC2 in a patient in need thereof, the method comprising administering to the patient a therapeutically effective amount of a composition comprising a modified mRNA encoding a BSEP polypeptide.

28. The method of claim 27, wherein the modified mRNA encoding a BSEP polypeptide comprises an open reading frame encoding ABCB11.

29. A method of treating PFIC1 in a patient in need thereof, the method comprising administering to the patient a therapeutically effective amount of a composition comprising a modified mRNA encoding ATP8B1.

30. A composition comprising a modified mRNA molecule encoding an ABCB4 polypeptide for use in a method of treating or preventing progressive familial intrahepatic choleostasis type 3 (PFIC3).

31. A composition comprising a modified mRNA encoding a BSEP polypeptide for use in a method of treating PFIC2 or BRIC2.

32. A composition comprising a modified mRNA encoding ATP8B1 for use in a method of treating PFIC1.

33. Use of a composition comprising a modified mRNA molecule encoding an ABCB4 polypeptide for the manufacture of a medicament for use in a method as defined in any one of claims 22-26.
